(19) United States
(12) Patent Application Publication
(10) Pub. No.: US 2023/0018543 A1
(43) Pub. Date: Jan. 19, 2023

(54) CRISPR/CAS-MEDIATED GENE CONVERSION

(71) Applicant: Editas Medicine, Inc., Cambridge, MA (US)

(72) Inventors: Cecilia Cotta-Ramusino, Cambridge, MA (US); Jennifer Leah Gori, Jamaica Plain, MA (US)

(21) Appl. No.: 17/672,387

(22) Filed: Feb. 15, 2022

Related U.S. Application Data
(63) Continuation of application No. 15/081,456, filed on Mar. 25, 2016, now abandoned.
Application No. 15/081,456 is a continuation-in-part of application No. PCT/US2015/059782, filed on Nov. 9, 2015.
(60) Provisional application No. 62/138,948, filed on Mar. 26, 2015.
(60) Provisional application No. 62/182,416, filed on Jun. 19, 2015.
(60) Provisional application No. 62/194,078, filed on Jul. 17, 2015.
(60) Provisional application No. 62/220,660, filed on Sep. 18, 2015.
(60) Provisional application No. 62/232,675, filed on Sep. 25, 2015.
(60) Provisional application No. 62/232,683, filed on Sep. 25, 2015.

(51) Int. Cl. A61K 38/46; C12N 9/22; A61K 48/00; C12N 15/10

(52) U.S. Cl. CPC A61K 38/465; C12N 9/22; A61K 48/005; C12N 15/102; C12Y 301/00; C12N 2310/20

(57) ABSTRACT

CRISPR/CAS-related compositions and methods for altering a cell or treating a disease, for example, by gene conversion, are disclosed.

### RELATED APPLICATIONS

[0001] This application is a continuation of U.S. patent application Ser. No. 15/081,456, filed on Mar. 25, 2016, which in turn claims priority to U.S. Provisional Patent Application No. 62/138,948, filed on Mar. 26, 2015; to U.S. Provisional Patent Application No. 62/182,416, filed Jun. 19, 2015; to U.S. Provisional Patent Application No. 62/194,078, filed on Jul. 17, 2015; to U.S. Provisional Patent Application No. 62/220,660, filed on Sep. 18, 2015; to U.S. Provisional Patent Application No. 62/232,675, filed on Sep. 25, 2015; to U.S. Provisional Patent Application No. 62/232,683, filed on Sep. 25, 2015; and is a continuation-in-part of International Patent Application No. PCT/US2015/059782, filed on Nov. 9, 2015, the entire contents of each of which are expressly incorporated herein by reference.

### SEQUENCE LISTING

[0002] The instant application contains a Sequence Listing which has been submitted electronically in ASCII format and is hereby incorporated by reference in its entirety. Said ASCII copy, created on Feb. 15, 2022, is named 126454-00407_ST25.txt and is 1,855,491 bytes in size.

### FIELD OF THE INVENTION

[0003] The invention relates to CRISPR/CAS-related methods and components for increasing editing of a target nucleic acid sequence by gene conversion using an endogenous homologous region, and applications thereof.

### BACKGROUND

[0004] The CRISPR (Clustered Regularly Interspaced Short Palindromic Repeats)/Cas (CRISPR-associated) system evolved in bacteria and archaea as an adaptive immune system to defend against viral attack. Upon exposure to a virus, short segments of viral DNA are integrated into the CRISPR locus. RNA is transcribed from a portion of the CRISPR locus that includes the viral sequence. That RNA, which contains sequence complimentary to the viral genome, mediates targeting of a Cas9 protein to the sequence in the viral genome. The Cas9 protein cleaves and thereby silences the viral target.

[0005] Recently, the CRISPR/Cas system has been adapted for genome editing in eukaryotic cells. The introduction of site-specific double strand breaks (DSBs) enables target nucleic acid alteration. After the formation of a DNA double-stranded break (DSB), the major decision point affecting DNA repair pathway choice is whether or not the DNA ends are endo- and exonucleolytically processed in a process referred to as end resection. When no end resection takes places, the repair pathway engaged to repair the DSB is referred to as classical non-homologous end joining (C-NHEJ). The C-NHEJ repair pathway leads to either perfect repair of the DSBs, in which case the locus is restored without sequence alterations, or to the formation of small insertions and deletions.

[0006] In contrast, if the end resection machinery processes the DSB, a 3′ overhang is exposed, which engages in homology search. A not yet completely characterized class of pathways that can engage the repair of DSBs after resection is initiated is referred to as alternative non-homologous end joining (ALT-NHEJ). Examples of pathways that are categorized as ALT-NHEJ include blunt end-joining (blunt EJ) and microhomology mediated end joining (MMEJ) leading to deletions, as well as synthesis dependent micro homology mediated end joining (SD-MMEJ), leading to the formation of insertions.

[0007] When the end resection is extensive, the exposed 3′ overhang can undergo strand invasion of highly homologous sequences, followed by repair of the DSB by a homology-dependent recombination (HDR) pathway, which encompasses gene correction and gene conversion. Gene correction refers to the process of repairing DNA damage by HDR using an exogenous nucleic acid, e.g., an exogenous donor template nucleic acid. Gene conversion is a process whereby a DNA break leads to repair of the sequence in the vicinity of the break by an endogenous homologous sequence, referred to as an endogenous donor template sequence. An endogenous donor template sequence can be derived from a non-sister chromatid sequence or from a heterologous sequence that has a high degree of homology with the sequence undergoing repair. The DNA sequence that is converted can comprise a small portion of a gene (e.g., fewer than 100 bp) or an entire gene sequence (e.g., greater than 5 kb). Gene conversion is a common form of DNA double-strand break repair in both non-mammalian and mammalian, e.g., human, cells.

[0008] While a cell could, in theory, repair DNA breaks via any of a number of DNA damage repair pathways, in certain circumstances it is particularly useful to provide an environment more favorable for repair of a break by gene conversion using an endogenous homologous region as a donor template. However, there remains a need to improve the efficiency of gene conversion-mediated modification in order to broaden the applicability and efficiency of genome editing by CRISPR/Cas systems.

### SUMMARY

[0009] The methods and compositions described herein surprisingly increase DNA repair via gene conversion pathways to alter or modify, e.g., repair, sequences, e.g., genes, such as disease causing genes, using an endogenous homologous region which functions as a donor template, following a Cas9 molecule-mediated cleavage event. In one embodiment, the endogenous homologous region is, for example, a sequence of a non-sister chromatid or a heterologous sequence from a different gene that has a high degree of homology with the sequence undergoing repair. In one embodiment, introduction of two 5′ single-strand breaks by a targeted Cas9 nickase increases the rate of DNA repair via gene conversion.

[0010] In one aspect, this disclosure relates to methods and compositions for modifying a target gene in a mammalian cell, involving contacting the cell with first and second Cas9 nickases and first and second (non-naturally occurring) guide RNAs (gRNAs). The first Cas9 nickase and the first gRNA generate a first single strand break on a first strand of the target gene, while the second Cas9 nickase and the second gRNA generate a single strand break on a second strand of the target gene, thereby forming within the target gene a double strand break having two 5′ overhangs. The double strand break having two 5′ overhangs is then repaired by gene conversion using an endogenous homologous region as a template sequence, thereby modifying the target gene to comprise a sequence that is identical to the endogenous homologous region.

[0011] In one embodiment, the endogenous homologous region is located on a chromosome on which the target gene is located. For example, the endogenous homologous region may be located in a region of a gene that is homologous to the portion of the target gene to be altered. In some embodiments, the endogenhous homologous region is located within a gene cluster comprising the target gene. In one embodiment, the target gene is an HBB gene, and the endogenous homologous region is a region of an HBD gene. Alternatively or additionally, the target gene to be modified can comprise a sequence (for instance, a point mutation, insertion or deletion) linked to a disease, while the endogenous homologous region sequence does not include such a sequence (for instance, a point mutation, insertion or deletion) linked to a disease.

[0012] Methods according to this disclosure may be used to alter the genotype of a cell, for instance, to treat a disease, such as sickle-cell anemia, beta-thallessemia, spinal muscular atrophy and/or chronic granulomatous disease.

[0013] In another aspect, disclosed herein is a method of modifying an endogenous target gene in a cell, the method comprising contacting the cell with a first gRNA molecule, a first enzymatically active Cas9 (eaCas9) molecule, a second gRNA molecule, and a second eaCas9 molecule; wherein the first gRNA molecule and the first eaCas9 molecule associate with the target gene and generate a first single strand cleavage event on a first strand of the target gene; wherein the second gRNA molecule and the second eaCas9 molecule associate with the target gene and generate a second single strand cleavage event on a second strand of the target gene, thereby forming a double strand break in the target gene having a first overhang and a second overhang; and wherein the first overhang and the second overhang in the target gene are repaired using an endogenous homologous region, thereby modifying the endogenous target gene in the cell.

[0014] In one embodiment, after repair of the first overhang and the second overhang, the target gene comprises the sequence of the endogenous homologous region.

[0015] In one embodiment, the cell is not contacted with an exogenous nucleic acid homologous to the target gene. In one embodiment, the cell is not contacted with an exogenous template nucleic acid.

[0016] In one embodiment, the first overhang and the second overhang are repaired by homology directed repair (HDR). In one embodiment, the homology directed repair (HDR) is gene conversion.

[0017] In one embodiment, the first overhang is a 5′ overhang. In another embodiment, the second overhang is a 5′ overhang. In one embodiment, the first overhang is a 5′ overhang, and the second overhang is a 5′ overhang.

[0018] In one embodiment, the first overhang and the second overhang undergo processing, exposing a first 3′ overhang and a second 3′ overhang. In one embodiment, the processing is endonucleolytic processing. In another embodiment, the processing is exonucleolytic processing.

[0019] In one embodiment, the method is used to correct a mutation in the target gene, wherein the mutation is located between the first single strand break and the second single strand break. In one embodiment, the method is used to correct a mutation in the target gene, wherein the mutation is located within fewer than 50 nucleotides of the first single strand break. In one embodiment, the method is used to correct a mutation in the target gene, wherein the mutation is located within fewer than 50 nucleotides of the second single strand break.

[0020] In one embodiment, the method is used to correct a mutation in the endogenous target gene, and wherein the first gRNA molecule positions the first single strand cleavage event 5′ to the mutation on the first strand of the target gene. In one embodiment, the method is used to correct a mutation in the endogenous target gene, and wherein the first gRNA molecule positions the first single strand cleavage event 5′ to the mutation on a first strand of the target gene, as shown in the diagram below:

[chemical structure]

wherein X₁ is the first single strand cleavage event and M is mutation in the target gene.

[0021] In one embodiment, the method is used to correct a mutation in the endogenous target gene, and wherein the second gRNA molecule positions the second single strand cleavage event 5′ to the mutation on a second strand of the target gene. In one embodiment, the method is used to correct a mutation in the endogenous target gene, and wherein the second gRNA molecule positions the second single strand cleavage event 5′ to the mutation on a second strand of the target gene, as shown in the diagram below:

[chemical structure]

wherein X₂ is the second single strand cleavage event and M is the mutation in the target gene.

[0022] In one embodiment, the method is used to correct a mutation in the endogenous target gene, and wherein the first gRNA molecule positions the first single strand cleavage event 5′ to the mutation on a first strand of the target gene, and wherein the second gRNA molecule positions the second single strand cleavage event 5′ to the mutation on a second strand of the target gene. In one embodiment, the method is used to correct a mutation in the endogenous target gene, and wherein the first gRNA molecule positions the first single strand cleavage event 5′ to the mutation on a first strand of the target gene, and wherein the second gRNA molecule positions the second single strand cleavage event 5′ to the mutation on a second strand of the target gene, as shown in the diagram below:

[chemical structure]

wherein X₁ is first single strand cleavage event, X₂ is the second single strand cleavage event, and M is the mutation in the target gene.

[0023] In one embodiment, the mutation is a point mutation (GAG to GTG) in the sense strand of the HBB gene, which results in the substitution of valine for glutamic acid at amino acid position 6 in exon 1 of the HBB gene.

[0024] In one embodiment, the cell is a population of cells.

[0025] In one embodiment, the first single strand cleavage event results in a first 5′ overhang, and wherein the second single strand cleavage event results in a second 5′ overhang. In one embodiment, the endogenous target gene has at least 80% sequence homology with the endogenous homologous region. In one embodiment, the endogenous target gene has at least 85% sequence homology with the endogenous homologous region. In one embodiment, the endogenous target gene has at least 92% sequence homology with the endogenous homologous region. In one embodiment, the endogenous target gene has at least 95% sequence homology with the endogenous homologous region. In one embodiment, the endogenous target gene has at least 80%, 81%, 82%, 83%, 84%, 85%, 86%, 87%, 88%, 89%, 90%, 91%, 92%, 93%, 94%, 95%, 96%, 97%, 98%, 99%, or 100% sequence homology with the endogenous homologous region.

[0026] In one embodiment, the method is used to correct a mutation in the endogenous target gene, and wherein the endogenous homologous region comprises a domain which is homologous to a domain in the endogenous target gene but which does not comprise the mutation.

[0027] In one embodiment, the endogenous homologous region comprises a control region which is homologous to a control region of the target gene, a coding region which is homologous to a coding region of the target gene, a non-coding region which is homologous to a non-coding region of the target gene, an intron which is homologous to an intron of the target gene, or an exon which is homologous to an exon of the target gene.

[0028] In one embodiment, the first eaCas9 molecule is a first nickase molecule and the second eaCas9 molecule is a second nickase molecule. In one embodiment, each nickase molecule forms a single strand break in the target gene. In one embodiment, the first eaCas9 molecule and the second eaCas9 molecule are the same species of eaCas9 molecule.

[0029] In one embodiment, the eaCas9 molecule comprises HNH-like domain cleavage activity but has no N-terminal RuvC-like domain cleavage activity. In one embodiment, the eaCas9 molecule is an HNH-like domain nickase. In one embodiment, the eaCas9 molecule comprises a mutation at an amino acid position corresponding to amino acid position D10 of Streptococcus pyogenes Cas9.

[0030] In one embodiment, the target gene is an HBB gene. In one embodiment, the method is used to correct a mutation in the HBB target gene, wherein the mutation in the HBB target gene causes sickle cell disease or beta-thalassemia. In one embodiment, the mutation in the HBB target gene is a substitution of valine for glutamic acid at amino acid position 6 in exon 1 of the HBB gene. In one embodiment, the endogenous homologous region is in an endogenous HBD gene.

[0031] In one embodiment, the first gRNA molecule is a gRNA molecule comprising a sequence set forth as any one of SEQ ID NOs: 387-485, 6803-6871, or 16010-16256, and the second gRNA molecule is a gRNA molecule comprising a sequence set forth as any one of SEQ ID NOs: 387-485, 6803-6871, or 16010-16256. In one embodiment, the first gRNA molecule is a gRNA molecule comprising a sequence of SEQ ID NO:387, and the second gRNA molecule is a gRNA molecule comprising a sequence of SEQ ID NO:16318. In one embodiment, the first gRNA molecule is a gRNA molecule comprising a sequence of SEQ ID NO:387, and the second gRNA molecule is a gRNA molecule comprising a sequence of SEQ ID NO:388.

[0032] In one embodiment, the target gene is an SMN1 gene. In one embodiment, the method is used to correct a mutation in the SMN1 target gene, and wherein the mutation in the SMN1 gene causes spinal muscular atrophy. In one embodiment, the endogenous homologous region is in an SMN2 gene.

[0033] In one embodiment, the target gene is an NCF1 (p47-PHOX) gene. In one embodiment, the method is used to correct a mutation in the NCF1 target gene, and wherein the mutation in the NCF1 gene causes chronic granulomatous disease. In one embodiment, the endogenous homologous region is in a p47-PHOX pseudogene.

[0034] In one embodiment, the cell is a population of cells. In one embodiment, the first overhang and the second overhang in the target gene are repaired by gene conversion in at least 12% of the cells in the population of cells. In one embodiment, the first overhang and the second overhang in the target gene are repaired by gene conversion in at least 15% of the cells in the population of cells. In one embodiment, the first overhang and the second overhang in the target gene are repaired by gene conversion in at least 20% of the cells in the population of cells. In one embodiment, the first overhang and the second overhang in the target gene are repaired by gene conversion in at least 25% of the cells in the population of cells. In one embodiment, the first overhang and the second overhang in the target gene are repaired by gene conversion in at least 30% of the cells in the population of cells. In one embodiment, the first overhang and the second overhang in the target gene are repaired by gene conversion in at least 35% of the cells in the population of cells. In one embodiment, the first overhang and the second overhang in the target gene are repaired by gene conversion in at least 40% of the cells in the population of cells. In one embodiment, the first overhang and the second overhang in the target gene are repaired by gene conversion in at least 45% of the cells in the population of cells.

[0035] In one embodiment, the first overhang and the second overhang in the target gene are repaired by gene conversion about 12% to about 45% of the cells in the population of cells. In one embodiment, the first overhang and the second overhang in the target gene are repaired by gene conversion about 15% to about 45% of the cells in the population of cells. In one embodiment, the first overhang and the second overhang in the target gene are repaired by gene conversion about 20% to about 45% of the cells in the population of cells. In one embodiment, the first overhang and the second overhang in the target gene are repaired by gene conversion about 25% to about 45% of the cells in the population of cells. In one embodiment, the first overhang and the second overhang in the target gene are repaired by gene conversion about 12% to about 40% of the cells in the population of cells. In one embodiment, the first overhang and the second overhang in the target gene are repaired by gene conversion about 12% to about 30% of the cells in the population of cells. In one embodiment, the first overhang and the second overhang in the target gene are repaired by gene conversion about 12% to about 25% of the cells in the population of cells.

[0036] In one embodiment, the cell is a population of hematopoietic stem cells (HSCs). In one embodiment, the first overhang and the second overhang in the target gene are repaired by gene conversion in at least 4% of the cells in the population of HSCs. In one embodiment, the first overhang and the second overhang in the target gene are repaired by gene conversion in at least 5% of the cells in the population of HSCs. In one embodiment, the first overhang and the second overhang in the target gene are repaired by gene conversion in at least 6% of the cells in the population of HSCs. In one embodiment, the first overhang and the second overhang in the target gene are repaired by gene conversion in about 4% to about 6% of the cells in the population of HSCs.

[0037] In one embodiment, the first overhang and the second overhang in the target gene are repaired by non-homologous end joining (NHEJ) in less than 40% of the cells in the population of cells. In one embodiment, the first overhang and the second overhang in the target gene are repaired by non-homologous end joining (NHEJ) in less than 30% of the cells in the population of cells. In one embodiment, the first overhang and the second overhang in the target gene are repaired by non-homologous end joining (NHEJ) in less than 20% of the cells in the population of cells. In one embodiment, the NHEJ results in a deletion in the target gene. In one embodiment, the NHEJ results in an insertion in the target gene.

[0038] In one embodiment, the cell is from a subject suffering from a disease. In one embodiment, the disease is a blood disease, an immune disease, a neurological disease, a cancer, or an infectious disease. In one embodiment, the disease is beta thalassemia, sickle cell disease, spinal muscular atrophy, or chronic granulomatous disease. In one embodiment, the cell is a mammalian cell, e.g., a human cell.

[0039] In one embodiment, the cell is a blood cell, a neuronal cell, an immune cell, a muscle cell, a stem cell, a progenitor cell, or a diseased cell. In one embodiment, the cell is a T-cell. In one embodiment, the method further comprises contacting the cells with CD3/CD28 immunomagnetic beads. In one embodiment, contacting the cells with the immunomagnetic beads increases the level of gene conversion in the cell.

[0040] In one embodiment, the contacting step is performed ex vivo. In one embodiment, the contacted cell is returned to the body of the subject.

[0041] In one embodiment, the contacting is performed in vivo.

[0042] In one embodiment, the method further comprises sequencing the target gene in the cell and sequencing the endogenous homologous region in the cell before the contacting step. In one embodiment, a portion of the target gene is sequenced. In one embodiment, the method further comprises sequencing the target gene in the cell after the contacting step. In one embodiment, a portion of the target gene is sequenced.

[0043] In another aspect, disclosed herein is a method of treating a disease in a subject having a mutation in an endogenous target gene, the method comprising contacting a cell from the subject with a first gRNA molecule, a first enzymatically active Cas9 (eaCas9) molecule, a second gRNA molecule, and a second eaCas9 molecule; wherein the first gRNA molecule and the first eaCas9 molecule associate with the target gene and generate a first single strand cleavage event on a first strand of the target gene; wherein the second gRNA molecule and the second eaCas9 molecule associate with the target gene and generate a second single strand cleavage event on a second strand of the target gene, thereby forming a double strand break in the target gene having a first overhang and a second overhang; and wherein the first overhang and the second overhang in the target gene are repaired using an endogenous homologous region which does not comprise the mutation, correcting the mutation in the endogenous target gene in the cell, thereby treating the disease in the subject having the mutation in the endogenous gene.

[0044] In one embodiment, the cell is not contacted with an exogenous nucleic acid homologous to the target gene.

[0045] In one embodiment, the cell is a population of cells.

[0046] In one embodiment, the endogenous target gene has at least 80% sequence homology with the endogenous homologous region. In one embodiment, the endogenous target gene has at least 85% sequence homology with the endogenous homologous region. In one embodiment, the endogenous target gene has at least 92% sequence homology with the endogenous homologous region. In one embodiment, the endogenous target gene has at least 95% sequence homology with the endogenous homologous region. In one embodiment, the endogenous target gene has at least 80%, 81%, 82%, 83%, 84%, 85%, 86%, 87%, 88%, 89%, 90%, 91%, 92%, 93%, 94%, 95%, 96%, 97%, 98%, 99%, or 100% sequence homology with the endogenous homologous region.

[0047] In one embodiment, the endogenous homologous region comprises a domain which is homologous to a domain in the target gene but which does not comprise the mutation. In one embodiment, the endogenous homologous region comprises a control region which is homologous to a control region of the target gene, a coding region which is homologous to a coding region of the target gene, a non-coding region which is homologous to a non-coding region of the target gene, an intron which is homologous to an intron of the target gene, or an exon which is homologous to an exon of the target gene.

[0048] In one embodiment, the first eaCas9 molecule and the second eaCas9 molecule are each nickase molecules. In one embodiment, the first eaCas9 molecule and the second eaCas9 molecule are the same species of nickase molecule. In one embodiment, the eaCas9 nickase molecule comprises a mutation at an amino acid position corresponding to amino acid position D10 of Streptococcus pyogenes Cas9.

[0049] In one embodiment, the target gene is an HBB gene. In one embodiment, the method is used to correct a mutation in the HBB target gene, wherein the mutation in the HBB target gene causes sickle cell disease or beta-thalassemia. In one embodiment, the mutation in the HBB target gene is a substitution of valine for glutamic acid at amino acid position 6 in exon 1 of the HBB gene. In one embodiment, the endogenous homologous region is from an endogenous HBD gene.

[0050] In one embodiment, the first gRNA molecule is a gRNA molecule comprising a sequence set forth as any one of SEQ ID NOs: 387-485, 6803-6871, or 16010-16256, and the second gRNA molecule is a gRNA molecule comprising a sequence set forth as any one of SEQ ID NOs: 387-485, 6803-6871, or 16010-16256. In one embodiment, the first gRNA molecule is a gRNA molecule comprising a sequence of SEQ ID NO:387, and the second gRNA molecule is a gRNA molecule comprising a sequence of SEQ ID NO:16318.

[0051] In one embodiment, the target gene is an SMN1 gene. In one embodiment, the method is used to correct a mutation in the SMN1 target gene, and wherein the mutation in the SMN1 gene causes spinal muscular atrophy. In one embodiment, the endogenous homologous region is in an SMN2 gene.

[0052] In one embodiment, the target gene is an NCF1 (p47-PHOX) gene. In one embodiment, the method is used to correct a mutation in the NCF1 target gene, and wherein the mutation in the NCF1 gene causes chronic granulomatous disease. In one embodiment, the endogenous homologous region is in a p47-PHOX pseudogene.

[0053] In one embodiment, the cell is a blood cell, a neuronal cell, an immune cell, a muscle cell, a stem cell, a progenitor cell, or a diseased cell. In one embodiment, the cell is a mammalian cell, e.g., a human cell.

[0054] In one embodiment, the contacting step is performed ex vivo. In one embodiment, the contacted cell is returned to the body of the subject. In one embodiment, the contacting is performed in vivo.

[0055] In one embodiment, the cell is a population of cells. In one embodiment, the first overhang and the second overhang in the target gene are repaired by gene conversion in at least 12% of the cells in the population of cells. In one embodiment, the first overhang and the second overhang in the target gene are repaired by gene conversion in at least 15% of the cells in the population of cells. In one embodiment, the first overhang and the second overhang in the target gene are repaired by gene conversion in at least 20% of the cells in the population of cells. In one embodiment, the first overhang and the second overhang in the target gene are repaired by gene conversion in at least 25% of the cells in the population of cells. In one embodiment, the first overhang and the second overhang in the target gene are repaired by gene conversion in at least 30% of the cells in the population of cells. In one embodiment, the first overhang and the second overhang in the target gene are repaired by gene conversion in at least 35% of the cells in the population of cells. In one embodiment, the first overhang and the second overhang in the target gene are repaired by gene conversion in at least 40% of the cells in the population of cells. In one embodiment, the first overhang and the second overhang in the target gene are repaired by gene conversion in at least 45% of the cells in the population of cells.

[0056] In one embodiment, the first overhang and the second overhang in the target gene are repaired by gene conversion about 12% to about 45% of the cells in the population of cells. In one embodiment, the first overhang and the second overhang in the target gene are repaired by gene conversion about 15% to about 45% of the cells in the population of cells. In one embodiment, the first overhang and the second overhang in the target gene are repaired by gene conversion about 20% to about 45% of the cells in the population of cells. In one embodiment, the first overhang and the second overhang in the target gene are repaired by gene conversion about 25% to about 45% of the cells in the population of cells. In one embodiment, the first overhang and the second overhang in the target gene are repaired by gene conversion about 12% to about 40% of the cells in the population of cells. In one embodiment, the first overhang and the second overhang in the target gene are repaired by gene conversion about 12% to about 30% of the cells in the population of cells. In one embodiment, the first overhang and the second overhang in the target gene are repaired by gene conversion about 12% to about 25% of the cells in the population of cells.

[0057] In one embodiment, the cell is a population of hematopoietic stem cells (HSCs). In one embodiment, the first overhang and the second overhang in the target gene are repaired by gene conversion in at least 4% of the cells in the population of HSCs. In one embodiment, the first overhang and the second overhang in the target gene are repaired by gene conversion in at least 5% of the cells in the population of HSCs. In one embodiment, the first overhang and the second overhang in the target gene are repaired by gene conversion in at least 6% of the cells in the population of HSCs. In one embodiment, the first overhang and the second overhang in the target gene are repaired by gene conversion in about 4% to about 6% of the cells in the population of HSCs.

[0058] In one embodiment, the first overhang and the second overhang in the target gene are repaired by non-homologous end joining (NHEJ) in less than 40% of the cells in the population of cells. In one embodiment, the first overhang and the second overhang in the target gene are repaired by non-homologous end joining (NHEJ) in less than 30% of the cells in the population of cells. In one embodiment, the first overhang and the second overhang in the target gene are repaired by non-homologous end joining (NHEJ) in less than 20% of the cells in the population of cells. In one embodiment, the NHEJ results in a deletion in the target gene. In one embodiment, the NHEJ results in an insertion in the target gene.

[0059] In one aspect, disclosed herein is a cell, e.g., a mammalian cell, such as a human cell, altered by any of the methods disclosed herein.

[0060] In one aspect, disclosed herein is a pharmaceutical composition comprising a cell, e.g., a mammalian cell, such as a human cell, altered by any of the methods disclosed herein.

[0061] In another aspect, disclosed herein is a composition comprising: a first non-naturally occurring gRNA molecule, a first non-naturally occurring enzymatically active Cas9 (eaCas9) molecule, a second non-naturally occurring gRNA molecule, and a second non-naturally occurring eaCas9 molecule; wherein the first gRNA molecule and the first eaCas9 molecule are designed to associate with a target gene and generate a first single strand cleavage event on a first strand of the target gene; wherein the second gRNA molecule and the second eaCas9 molecule are designed to associate with the target gene and generate a second single strand cleavage event on a second strand of the target gene, thereby forming a double strand break having a first overhang and a second overhang; and wherein the first gRNA molecule, the first eaCas9 molecule, the second gRNA molecule and the second eaCas9 molecule are designed such that the first overhang and the second overhang in the target gene are repaired by gene conversion.

[0062] In one embodiment, the first overhang and the second overhang in the target gene are repaired by gene conversion using an endogenous homologous region.

[0063] In one embodiment, the double strand break is in the target gene.

[0064] In one embodiment, the composition does not comprise an exogenous nucleic acid homologous to the target gene.

[0065] In one embodiment, the first overhang is a 5′ overhang, and the second overhang is a 5′ overhang.

[0066] In one embodiment, the target gene is an HBB gene. In another embodiment, the endogenous homologous region is in an HBD gene.

[0067] In one embodiment, the method is used to correct a mutation in the target gene, wherein the mutation is located between the first single strand break and the second single strand break.

[0068] In one embodiment, the method is used to correct a mutation in the target gene, wherein the mutation is located within fewer than 50 nucleotides of the first single strand break. In one embodiment, the method is used to correct a mutation in the target gene, wherein the mutation is located within fewer than 50 nucleotides of the second single strand break.

[0069] In one embodiment, the first gRNA molecule is designed to position the first single strand cleavage event 5′ to a mutation on a first strand of the HBB target gene. In one embodiment, the first gRNA molecule is designed to position the first single strand cleavage event 5′ to a mutation on a first strand of the HBB target gene, as shown in the diagram below:

[chemical structure]

wherein X₁ is the first single strand cleavage event and M is the mutation in the HBB target gene.

[0070] In one embodiment, the second gRNA molecule is designed to position the second single strand cleavage event 5′ to a mutation on a second strand of the HBB target gene. In one embodiment, the second gRNA molecule is designed to position the second single strand cleavage event 5′ to a mutation on a second strand of the HBB target gene, as shown in the diagram below:

[chemical structure]

wherein X₂ is the second single strand cleavage event and M is the mutation in the HBB target gene.

[0071] In one embodiment, the first gRNA molecule is designed to position the first single strand cleavage event 5′ to a mutation on the first strand of the HBB target gene, and wherein the second gRNA molecule is designed to position the second single strand cleavage event 5′ to the mutation on the second strand of the HBB target gene. In one embodiment, the first gRNA molecule is designed to position the first single strand cleavage event 5′ to a mutation on the first strand of the HBB target gene, and wherein the second gRNA molecule is designed to position the second single strand cleavage event 5′ to the mutation on the second strand of the HBB target gene, as shown in the diagram below:

[chemical structure]

wherein X₁ is first single strand cleavage event, X₂ is the second single strand cleavage event, and M is the mutation in the HBB target gene.

[0072] In one embodiment, the first single strand cleavage event results in a first 5′ overhang, and wherein the second single strand cleavage event results in a second 5′ overhang.

[0073] In one embodiment, the endogenous target gene has at least 80% sequence homology with the endogenous homologous region. In one embodiment, the endogenous target gene has at least 85% sequence homology with the endogenous homologous region. In one embodiment, the endogenous target gene has at least 92% sequence homology with the endogenous homologous region. In one embodiment, the endogenous target gene has at least 95% sequence homology with the endogenous homologous region. In one embodiment, the endogenous target gene has at least 80%, 81%, 82%, 83%, 84%, 85%, 86%, 87%, 88%, 89%, 90%, 91%, 92%, 93%, 94%, 95%, 96%, 97%, 98%, 99%, or 100% sequence homology with the endogenous homologous region.

[0074] In one embodiment, the first eaCas9 molecule is a first nickase molecule and the second eaCas9 molecule is a second nickase molecule. In one embodiment, each nickase molecule forms a single strand break in the target gene. In one embodiment, the first eaCas9 nickase molecule and the second eaCas9 nickase molecule are the same species of nickase molecule.

[0075] In one embodiment, the eaCas9 nickase molecule comprises HNH-like domain cleavage activity but has no N-terminal RuvC-like domain cleavage activity. In one embodiment, the eaCas9 molecule is an HNH-like domain nickase. In one embodiment, the eaCas9 nickase molecule comprises a mutation at an amino acid position corresponding to amino acid position D10 of Streptococcus pyogenes Cas9.

[0076] In one embodiment, the first gRNA molecule is a gRNA molecule comprising a sequence set forth as any one of SEQ ID NOs: 387-485, 6803-6871, or 16010-16256, and the second gRNA molecule is a gRNA molecule comprising a sequence set forth as any one of SEQ ID NOs: 387-485, 6803-6871, or 16010-16256. In one embodiment, the first gRNA molecule is a gRNA molecule comprising a sequence of SEQ ID NO:387, and the second gRNA molecule is a gRNA molecule comprising a sequence of SEQ ID NO:16318.

[0077] In one embodiment, the composition is for use in a medicament. In another embodiment, the composition is for use in the treatment of spinal muscular atrophy. In one embodiment, the composition is for use in the treatment of chronic granulomatous disease. In one embodiment, the composition is for use in the treatment of sickle cell disease. In one embodiment, the composition is for use in the treatment of beta thalassemia.

[0078] In another aspect, disclosed herein is a method of modifying a target region of a target gene in a mammalian cell comprising generating, within the cell, a first single strand break on a first strand of the target gene and second single strand break on a second strand of the target gene, thereby forming a double strand break with a first 5′ overhang and a second 5′ overhang; and wherein the double strand break is repaired by gene conversion, thereby modifying the target region of the target gene in the mammalian cell.

[0079] In one embodiment, the target region of the target gene is located (a) between the first single strand break and the second single strand break, (b) within fewer than 50 nucleotides of the first single strand break, or (c) within fewer than 50 nucleotides of the second single strand break.

[0080] In another aspect, disclosed herein is a method of modifying a target region of a target gene in a mammalian cell comprising generating, within the cell, a first single strand break on a first strand of the target gene and second single strand break on a second strand of the target gene, thereby forming a double strand break with a first 5′ overhang and a second 5′ overhang; wherein the target region of the target gene is located (a) between the first single strand break and the second single strand break, (b) within fewer than 50 nucleotides of the first single strand break, or (c) within fewer than 50 nucleotides of the second single strand break; and wherein the double strand break is repaired by gene conversion, thereby modifying the target region of the target gene in the mammalian cell.

[0081] In one embodiment, the step of forming the first single strand break and the second single strand break comprises contacting the cell with at least one eaCas9 molecule, a first gRNA molecule, and a second gRNA molecule. In one embodiment, the first gRNA molecule and the at least one eaCas9 molecule associate with the target gene and generate the first single strand break, and the second gRNA molecule and the at least one eaCas9 molecule associate with the target gene and generate the second single strand break.

[0082] In one embodiment, the double strand break is repaired by gene conversion using an endogenous homologous region.

[0083] In one embodiment, the target gene is an HBB gene, and wherein the endogenous homologous region is a region of an HBD gene. In one embodiment, the first gRNA molecule comprises a targeting sequence comprising SEQ ID NO:387 and the second gRNA molecule comprises a targeting sequence comprising SEQ ID NO:16318.

[0084] In one embodiment, the at least one eaCas9 molecule is at least one eaCas9 nickase molecule. In one embodiment, the at least one eaCas9 nickase molecule is at least one HNH-type nickase molecule.

[0085] In one embodiment, the endogenous homologous region of the endogenous gene is located within a gene cluster comprising the target gene.

[0086] In another embodiment, disclosed herein is a method of increasing the percentage of cells in a population of cells that modify a target region of a target gene by gene conversion using an endogenous homologous region, the method comprising contacting the population of cells with a first gRNA molecule, a first enzymatically active Cas9 (eaCas9) molecule, a second gRNA molecule, and a second eaCas9 molecule; wherein the first gRNA molecule and the first eaCas9 molecule associate with the target gene and generate a first single strand cleavage event on a first strand of the target gene; wherein the second gRNA molecule and the second eaCas9 molecule associate with the target gene and generate a second single strand cleavage event on a second strand of the target gene, thereby forming a double strand break with a first 5′ overhang and a second 5′ overhang; and wherein the first 5′ overhang and the second 5′ overhang in the target gene are repaired by gene conversion using the endogenous homologous region, thereby increasing the percentage of cells in the population of cells that modify the target region of the target gene by gene conversion using the endogenous homologous region.

[0087] In one embodiment, the first 5′ overhang and the second 5′ overhang in the target gene are repaired by gene conversion in about 12% to about 45%, about 15% to about 30%, or about 15% to about 40% of the cells in the population of cells. In one embodiment, the cells are HEK293 cells. In one embodiment, the cells are K562 cells. In one embodiment, the cells are U2OS cells. In another embodiment, the cells are blood mononuclear cells, e.g., CD3+ T lymphocyte cells.

[0088] In one embodiment, the first 5′ overhang and the second 5′ overhang in the target gene are repaired by gene conversion in about 4% to about 6% of cells in the population of cells, wherein the cells are HSCs, e.g., CD34+ cells.

[0089] In one embodiment, the percentage of cells in the population of cells that modify the target region of the target gene by gene conversion using the endogenous homologous region is increased, as compared to a percentage of cells in a population of cells which would modify the target region of the target gene by gene conversion using the endogenous homologous region in the absence of the contacting.

[0090] In one embodiment, the percentage of cells in the population of cells that modify the target region of the target gene by gene conversion using the endogenous homologous region is increased, as compared to a percentage of cells in a population of cells which would modify the target region of the target gene by gene conversion using the endogenous homologous region after contacting the population of cells with a first gRNA molecule, a first enzymatically active Cas9 (eaCas9) molecule, a second gRNA molecule, and a second eaCas9 molecule which would generate a first 3′ overhang and a second 3′ overhang in the target gene.

[0091] In one embodiment, the percentage of cells in the population of cells that modify the target region of the target gene by gene conversion using the endogenous homologous region is increased, as compared to a percentage of cells in a population of cells which would modify the target region of the target gene by gene conversion using the endogenous homologous region after contacting the population of cells with a first gRNA molecule, a first enzymatically active Cas9 (eaCas9) molecule, a second gRNA molecule, and a second eaCas9 molecule which would generate a double strand blunt end brake in the target gene.

[0092] In one embodiment, the percentage of cells in the population of cells that modify the target region of the target gene by gene conversion using the endogenous homologous region is increased about 10%, 20%, 30%, 40%, 50%, 60%, 70%, 80%, 90%, 100%, two-fold, three-fold, four-fold, or five-fold. In one embodiment, the percentage of cells in the population of cells that modify the target region of the target gene by gene conversion using the endogenous homologous region is increased two-fold. In one embodiment, the percentage of cells in the population of cells that modify the target region of the target gene by gene conversion using the endogenous homologous region is increased three-fold. In one embodiment, the percentage of cells in the population of cells that modify the target region of the target gene by gene conversion using the endogenous homologous region is increased four-fold.

[0093] Headings, including numeric and alphabetical headings and subheadings, are for organization and presentation and are not intended to be limiting.

[0094] Other features and advantages of the invention will be apparent from the detailed description, drawings, and from the claims.

### BRIEF DESCRIPTION OF THE DRAWINGS

[0095] FIG. 1 depicts a scheme of the pair 8/15 of gRNAs surrounding the sickle mutation in combination with a Cas9 nickase (D10A or N863A). The nickases are shown as the grey ovals.

[0096] FIG. 2 depicts the percentages of total editing event after a wild type Cas9 or a Cas9 nickase (D10A or N863A). A repetition of at least three independent experiments for each condition is shown.

[0097] FIG. 3A depicts the frequency of deletions a wild type Cas9 or a Cas9 nickase (D10A or N863A). A representation of at least 3 independent experiments for each condition is shown.

[0098] FIG. 3B depicts the frequency distribution of the length of deletions using a wild type Cas9 and gRNA 8 (similar results have been obtained with gRNA 15).

[0099] FIG. 3C depicts the frequency distribution of the length of deletions using a Cas9 nickase (D10A) with gRNAs 8/15 (similar results have been obtained using Cas9 N863A).

[0100] FIG. 4A depicts the frequency of gene conversion using a wild type Cas9 or a Cas9 nickase (D10A or N863A).

[0101] FIG. 4B shows a scheme representing the region of similarity between the HBB and HBD loci.

[0102] FIG. 5 depicts the frequency of different lengths of HBD sequences that were incorporated into the HBB locus.

[0103] FIG. 6A depicts the frequency of insertions using a wild type Cas9 or a Cas9 nickase (D10A or N863A). A representation of at least three independent experiments for each condition is shown.

[0104] FIG. 6B depicts examples of common reads observed in U2OS cells electroporated with plasmid encoding Cas9 N863 and gRNA pair 8/15. The HBB reference is shown on the top.

[0105] FIG. 7A depicts the overall modification frequency at the HBB locus, separated into deletions, insertions, and gene conversion events. The different repair outcomes after WT (wild type), Cas9 D10 nickase or Cas9 N863A nickase activity in U2OS cells were measured by PCT amplification of individual amplification products. Error bars were derived from 5 independent experiments. Total number of sequences analyzed: n=569 for WT Cas9, n=718 for Cas9 D10A nickase, n=556 for Cas9 N863A nickase

[0106] FIG. 7B depicts the deletion size distribution for WT, Cas9 D10A nickase, or Cas9 N863A nickase. Total number of sequences analyzed: n=258 for WT Cas9, n=241 for Cas9 D10A nickase, n=103 for Cas9 N863A nickase. Individual deletion size data from each Cas9 variant was scored from Sanger sequencing.

[0107] FIG. 8A depicts the overall modification frequency separated into deletions, insertions and gene conversion events for either WT Cas9- (WT), Cas9 D10A nickase- (D10A), or Cas9 N863A nickase-nucleofected (N863A) population of U2OS cells (bulk) or individual single U2OS cell clones. For WT Cas9, 58 sequences were analyzed for populations of cells (bulk) and 92 individual clones were analyzed. For Cas9 D10A nickase, 62 sequences were analyzed for populations of cells (bulk) and 81 individual clones were analyzed. For Cas9 N863A nickase, 73 sequences were analyzed for populations of cells (bulk) and 96 individual clones were analyzed.

[0108] FIG. 8B depicts the overall modification frequency separated into deletions, insertions, and gene conversion events for either WT Cas9- (WT), Cas9 D10A nickase- (D10A), or Cas9 N863A nickase-nucleofected (N863A) K562 cells. Number of sequences analyzed: n=91 for WT Cas9, n=85 for Cas9 D10A nickase, n=131 for Cas9 N863A nickase.

[0109] FIG. 9 graphically depicts the positions of nucleotide mismatches (thin lines) and deletions (thick line) between the HBD and HBB genes and a histogram of the relative gene conversion frequency plotted as a function of the position on the Hbb locus.

[0110] FIG. 10A depicts western blot analyses of the knockdown efficiency of nucleofection of U2OS cells with siRNAs directed against firefly luciferase (FF, control), BRCA2, or RAD51 genes, as well as gel-loading controls. For BRCA2 knockdown, the gel loading control was β-actin. For RAD51 knockdown, the gel loading control was vinculin.

[0111] FIG. 10B depicts the overall modification frequency at the HBB locus separated into deletions, insertions, and gene conversion as determined by Sanger sequencing. U2OS cells nucleofected with siRNA against firefly luciferase (FF, control), BRCA2, or RAD51 genes, in addition to the Cas9 D10A nickase and gRNA pair 8/15. p-values for the differences in gene conversion frequency were calculated using the two-tailed Student's t-test. Four independent experiments were performed. Total number of sequences analyzed: n=476 for FF control siRNA treated cells, n=407 for BRCA2 siRNA treated cells, n=389 for RAD51 siRNA treated cells.

[0112] FIG. 10C depicts the overall modification frequency at the HBB locus resolved for deletions, insertions, and gene conversion as determined by Sanger sequencing. U2OS cells nucleofected with siRNA against firefly luciferase (FF, control), BRCA2, or RAD51 genes, in addition to the Cas9 D10A nickase and gRNA pair 8/15, in the presence of 50 pM of donor template. p-values for the differences in gene conversion frequency were calculated using the two-tailed Student's t-test. Total number of sequence from at least four independent experiments. Total number of sequences analyzed: n=770 for FF control siRNA treated cells, n=652 for BRCA2 siRNA treated cells, n=389 for RAD51 siRNA treated cells.

[0113] FIG. 11A depicts the raw number and percentage of insertions detected in individual cells nucleofected with the Cas9 D10A nickase or Cas9 N863A nickase and gRNA pair 8/15 that were either derived from the overhang, or that contain the full overhang repetition. Overhangs were defined as sequences that had at least a consecutive stretch of 9 nucleotides of the predicted overhang sequence present. P=value was calculated using Fisher's exact test.

[0114] FIG. 11B depicts histogram plots of insertion length for either the Cas9 D10A nickase- or Cas9 N863A nickase-induced lesions. Individual insertion size data from each Cas9 variant was scored from Sanger sequencing data of U2OS cells treated with either Cas9 10A nickase or Cas9 N863A nickase and gRNA pair 8/15. Difference in length between Cas9 D10A nickase- and Cas9 N863A nickase-induced lesions was significant (p=1.274×10⁻¹²; permutation test). Number of insertions plotted: n=75 for Cas9 D10A nickase, and n=325 for Cas9 N863A nickase.

[0115] FIG. 12A depicts histogram plots showing how frequently and the position in the overhang of 4-mers found within insertion sequences aligned to different positions along the overhang sequence in U2OS cells treated with either Cas9 10A nickase or Cas9 N863A nickase and gRNA pair 8/15. Parts of insertion sequences containing the 4-mer sequence could not be uniquely mapped to a single position within the overhang.

[0116] FIG. 12B depicts exemplary insertion sequences of the full overhang resulting from Cas9 D10A nickase or Cas9 N863A nickase-induced lesions. Cas9 D10 nickase-induced insertions did not show overlaps, while Cas9 N863A nickase-induced insertions showed overlaps, indicating microhomology usage. Positioning of each gRNA (gRNA8 or gRNA15) shown as indicated. Position of the PAM indicated in black.

[0117] FIG. 13A is a schematic representation of the donor template.

[0118] FIG. 13B depicts the frequency of HDR using a wild type Cas9 or a Cas9 nickase (D10A or N863A).

[0119] FIG. 13C depicts different forms of donors and their contribution to HDR.

[0120] FIG. 14 depicts the overall modification frequency at the HBB locus separated into repair outcomes (i.e., deletions, insertions, gene conversion, and gene correction) for either WT Cas9-(WT), Cas9 D10A nickase- (D10A), or Cas9 N863A nickase-nucleofected (N863A) U2OS cells in the presence of 50 pM ssODN donor template. Repair outcomes were determined by PCR amplification of the HBB locus, followed by Sanger sequencing of individual amplification products. p-value for the difference in gene correction frequency was calculated using the two-tailed Student's t-test. Total number of sequences plotted from at least three independent experiments: n=200 for WT Cas9, n=448 for Cas9 D10A nickase, and n=422 for Cas9 N863A nickase.

[0121] FIG. 15 depicts the distribution of the editing events on the presence of wild type Cas9 with gRNA 8, gRNA 15 and with the Cas9 nickase (D10A) with gRNA 8/15 pair.

[0122] FIG. 16A depicts the overall modification frequency of U2OS cells nucleofected with either WT Cas9, Cas9 D10 nickase, or Cas9 N863A nickase and gRNA8. Sequencing was performed using Illumina MiSeq and modifications were quantified computationally using CRISPResso.

[0123] FIG. 16B depicts a 15% urea polyacrylamide gel electrophoresis displaying the cutting efficiency of various amounts of Cas9 D10A nickase and gRNA8 or Cas9 N863A nickase and gRNA8 complexes with double stranded DNA. Cleavage products are indicated.

[0124] FIG. 17A depicts the frequency of deletions, insertions, gene conversion, and gene correction observed in U2OS cells nucleofected with either WT Cas9, Cas9 D10A nickase, or Cas9 N863A nickase, gRNA8, donor template and siRNAs against firefly luciferase (FF, control), BRCA2, or RAD51. Sequencing was performed using MiSeq and modifications were scored by computationally using CRISPResso.

[0125] FIG. 18A depicts a bar graph of fold change in the rates of total editing events and gene correction for U2OS cells nucleofected with either WT Cas9, Cas9 D10A nickase, or Cas9 N863A nickase, gRNA8, donor template and siRNAs against RAD51.

[0126] FIG. 18B depicts histograms of the length of deletions induced in U2OS cells nucleofected with either WT Cas9, or Cas9 D10A nickase, gRNA8, donor template and siRNAs against firefly luciferase (FF, control) or RAD51.

[0127] FIG. 18C depicts a model of the possible role of HR in the processing of nicks that escaped single strand break repair in the presence or absence of RAD51.

[0128] FIG. 19 depicts genome editing of the HBB locus in bone marrow leukemia K562 hematopoietic cells after electroporation of Cas9 protein complexed to HBB gRNAs 8 and 15 (RNP) or Cas9 mRNA co-delivered with HBB gRNAs 8 and 15 (RNA). “gRNA 8” has the targeting domain sequence GUAACGGCAGACUUCUCCUC (SEQ ID NO: 388) and “gRNA 15” has the targeting domain sequence AAGGUGAACGUGGAUGAAGU (SEQ ID NO: 387).

[0129] FIG. 20 is a schematic of the HBB locus indicating the position of the different gRNA molecules used in the study.

[0130] FIG. 21 depicts the overall editing frequencies for the Cas9 D10A and Cas9 N863A nickases in terms of overhang length and composition.

[0131] FIG. 22 depicts the insertion frequencies for the Cas9 D10A and Cas9 N863A nickases in terms of overhang length and composition.

[0132] FIG. 23 depicts the percentages of insertions derived from the overhang sequence for the Cas9 D10A (left bars) and Cas9 N863 (right bars) nickases.

[0133] FIG. 24 depicts the lengths of insertions for the Cas9 D10A (left bars) and Cas9 N863 (right bars) nickases.

[0134] FIG. 25 depicts the effect of overhang length and composition on gene conversion induced by the Cas9 D10A and Cas9 N863 nickases.

[0135] FIG. 26 depicts the effect of overhang length and composition on gene correction induced by the Cas9 D10A and Cas9 N863A nickases.

[0136] FIGS. 27A and 27B depict an analysis of stability of D10A RNP in vitro and ex vivo in adult CD34+ HSCs. FIG. 27A depicts Differential Scanning Fluorimetry Shift Assay after complexing D10A protein with the indicated HBB gRNAs added at 1:1 molar ratio gRNA:RNP.

[0137] FIG. 27B depicts detection of Cas9 protein in cell lysates 72 hours after HSCs were electroporated with D10A RNP or D10A mRNA with gRNAs HBB-8 and HBB-15. The electroporation program (P2 or P3) used is indicated at the top of the image. 2× gRNA: 10 μg each gRNA was co-delivered with D10A mRNA (vs. 5 μg of each gRNA).

[0138] FIGS. 28A, 28B, and 28C depict adult CD34+ HSCs maintain stem cell phenotype after electroporation with D10A nickase RNP and HBB targeting gRNA pair. FIG. 28A depicts gene edited adult CD34+ cells maintain expression of stem cell markers CD34 and CD133 at 72 hours after electroporation. FIG. 28B depicts absolute live (7-AAD-AnnexinV⁻) CD34+ cell number at indicated time points relative to electroporation of D10A RNP HBB gRNA pair. FIG. 28C depicts gene edited adult CD34+ cells maintain hematopoietic colony forming cell (CFC) activity and multipotency. E: erythroid, G: granulocyte, M: macrophage, GM: granulocyte-macrophage, GEMM: granulocyte-erythrocyte-macrophage-monocyte CFCs.

[0139] FIGS. 29A, 29B, and 29C depict D10A nickase RNP co-delivered with HBB targeted gRNA pair supports gene editing and HDR in adult CD34+ HSCs. FIG. 29A depicts percentage of gene editing events as detected by T7E1 endonuclease assay analysis. FIG. 29B depicts DNA sequence analysis of the HBB locus. The subtypes of gene editing events (insertions, deletions, indels, and gene conversion events) are indicated. RNP* refers to use of electroporation program 3. FIG. 29C depicts percentages of types of editing events detected in the gDNA from the cells electroporated with the conditions shown in FIG. 29B. Data are shown as a percentage of all gene editing events.

[0140] FIG. 30 depicts flow cytometry analysis of β-hemoglobin expression in the erythroid progeny differentiated from D10A nickase RNP gene-edited adult CD34+ HSCs. CFU-E colonies (far left) differentiated from D10A RNP HBB gRNA electroporated CD34+ cells were dissociated, fixed, permeabilized, and stained for β-hemoglobin expression. The gene editing frequencies detect in the parental CD34+ cell population are indicated above the histograms for the indicated samples. The percentage of β-hemoglobin expression in each colony was determined by flow cytometry and is indicated at the top right of each histogram.

[0141] FIGS. 31A and 31B depict that cord blood CD34+ HSCs maintained stem cell phenotype after electroporation with D10A nickase RNP and HBB targeting gRNA pair. FIG. 31A depicts gene edited CB CD34⁺ cells maintain viability after electroporation. Right: Absolute live (7-AAD⁻AnnexinV⁻) CD34⁺ cell number at indicated time points relative to electroporation of D10A RNP HBB gRNA pair. FIG. 31B depicts that gene edited CB CD34⁺ cells maintained hematopoietic colony forming cell (CFC) activity and multipotency. E: erythroid, G: granulocyte, M: macrophage, GM: granulocyte-macrophage, GEMM: granulocyte-erythrocyte-macrophage-monocyte CFCs. The amounts of D10A RNP delivered per million cells (5 or 10 μg) and the 2-hour recovery temperature (parentheses) after electroporation of the parental CB CD34⁺ cells are indicated.

[0142] FIGS. 32A, 32B, and 32C depict D10A RNP co-delivered with HBB targeted gRNA pair supported gene editing and HDR in CB CD34+ HSCs. FIG. 32A depicts percentage of gene editing events as detected by T7E1 endonuclease assay analysis. FIG. 32B depicts DNA sequence analysis of the HBB locus. The subtypes of gene editing events (insertions, deletions, indels, and gene conversion events) are indicated as a fraction of the total sequencing reads. FIG. 32C depicts subtypes of gene editing events expressed as relative percentage to the total number gene editing events detected. The amounts of D10A RNP delivered per million cells (5 or 10 μg) and the 2-hour recovery temperature (parentheses) after electroporation of the parental CB CD34⁺ cells are indicated.

[0143] FIGS. 33A, 33B, and 33C depict directed differentiation of gene-edited CB CD34⁺ HSCs into erythroblasts. Flow cytometry analysis of day 18 erythroblasts differentiated from gene edited CB CD34⁺ cells. FIG. 33A depicts CD71 (transferrin receptor and CD235 (Glycophorin A). FIG. 33B depicts fetal hemoglobin (g-hemoglobin). FIG. 33C depicts loss of CD45 and dsDNA through enucleation as indicated by the absence of dsDNA (negative for dsDNA binding dye DRAQS). Note that, unlike adult CD34⁺ cells, CB CD34⁺ cells differentiated into fetal-like erythroblasts that express fetal g-hemoglobin (not adult b-hemoglobin).

[0144] FIGS. 34A and 34B depict cord blood CD34⁺ HSCs maintained stem cell phenotype after electroporation with Cas9 variant RNPs and HBB targeting gRNA pair. FIG. 34A depicts gene edited CB CD34⁺ cells maintain viability after electroporation with WT Cas9 endotoxin-free (EF WT) Cas9, N863A nickase, or D10A nickase co-delivered with HBB gRNA pair. Absolute live (7-AAD⁻AnnexinV-⁻) CD34⁺ cell number at indicated time points relative to electroporation.

[0145] FIG. 34B depicts gene edited CB CD34⁺ cells maintained hematopoietic colony forming cell (CFC) activity and multipotency. E: erythroid, G: granulocyte, M: macrophage, GM:

[0146] granulocyte-macrophage, GEMM: granulocyte-erythrocyte-macrophage-monocyte CFCs. The amounts of RNP delivered per million cells (10 μg) and the 2-hour recovery temperature (parentheses) after electroporation of the parental CB CD34⁺ cells are indicated.

[0147] FIGS. 35A and 35B depict comparison of gene editing at the HBB locus in CB CD34⁺ cells mediated by WT and nickase Cas9 variant RNPs. FIG. 35A depicts T7E1 analysis of the percentage of indels detected 72 hours after electroporation at the targeted site in the HBB locus after electroporation of WT Cas9, Endotoxin-free WT Cas9 (EF-WT), N863A nickase, and D10A nickase RNPs, each co-delivered with HBB-8 and HBB-15 gRNA pair. FIG. 35B depicts Western blot analysis showing detection of Cas9 variants in cell lysates of CB CD34⁺ cells at the indicated time points after electroporation. The amounts of RNP delivered per million cells (10 μg) and the 2-hour recovery temperature (parentheses) after electroporation of the parental CB CD34⁺ cells are indicated.

[0148] FIGS. 36A and 36B depict comparison of HDR and NHEJ events detected at the HBB locus after gene editing with WT Cas9 and D10A nickase in CB CD34⁺ HSCs. FIG. 36A depicts percentage of gene editing events (72 hours after electroporation) detected by DNA sequencing analysis and shown as a percentage of the total sequence reads. Cells received RNP (WT Cas9, Endotoxin-free WT Cas9 [EF-WT], N863A and D10A nickases) with HBB-8 and HBB-15 gRNA pair. FIG. 36B depicts percentages of types of editing events detected in the gDNA from the cells electroporated with the conditions shown in FIG. 36A. Data are shown as a percentage of all gene editing events.

[0149] FIG. 37 depicts that down-regulation of Pol Theta in the context of the D10A Cas9 does not affect the gene editing profile. In contrast, Pol Theta down-regulation in the context of a mutant Cas9 (such as the N863A Cas9 nuclease) leads to a strong reduction of the insertion frequency and an increase in the gene conversion rate. Cells were treated with either a control siRNA or an siRNA directed against Pol Theta. The N863A enzyme is directed to make two nicks at the target site resulting in a 3′ overhang. In the absence of Pol Theta, the rates of insertion are reduced and gene conversion is increased because the Alt-NHEJ pathway (Pol Theta Dependant) has been downregulated.

[0150] FIG. 38 depicts that the gene conversion frequency is highly impaired in the absence of BRCA2 and RAD51. D10A induced gene conversion is dependent on BRCA2 and RAD51. Cells were treated with siRNA against a negative control, BRCA2, and RAD51 in conjunction with D10A and gRNA 8 and 15.

[0151] FIG. 39 depicts a model of the genetic requirements of the gene conversion pathway in the context of different Cas9 nucleases (wild type, D10A or N863A) using BRCA2 and RAD51.

[0152] FIG. 40A, 40B and 40C depict that Cas9 D10A nickase RNP co-delivered with a HBB targeted gRNA pair supported gene editing in T lymphocytes expanded from peripheral blood mononuclear cells (MNCs) from a sickle cell disease (SCD) patient. FIG. 40A depicts the expansion/activation of the T lymphocyte fraction from bulk MNCs from a SCD patient using CD3/CD28 immunomagnetic beads at day 3 (left panel) and day 7 (right panel) after activation.

[0153] FIG. 40B depicts the total viability of expanded T lymphocytes electroporated with Cas9 D10A nickase complexed with a HBB targeted gRNA pair (HBB-8-sickle and HBB-15), and co-electroporated with a single stranded oligonucleotide donor, following reactivation CD3/CD28 immunomagnetic beads, no beads control (i.e., no exposure CD3/CD28 immunomagnetic beads) or negative control. FIG. 40C depicts gene editing frequency at the HBB locus of expanded T lymphocytes electroporated with Cas9 D10A nickase complexed with a HBB targeted gRNA pair (HBB-8-sickle and HBB-15), and co-electroporated with a single stranded oligonucleotide donor, following reactivation CD3/CD28 immunomagnetic beads, no beads control (i.e., no exposure CD3/CD28 immunomagnetic beads) or negative control.

### DETAILED DESCRIPTION

[0154] In order that the invention is understood, certain terms are herein defined.

### Definitions

[0155] “Alt-HDR” or “alternative HDR,” or alternative homology-directed repair, as used herein, refers to the process of repairing DNA damage using a homologous nucleic acid (e.g., an endogenous homologous sequence, e.g., a sister chromatid, or an exogenous nucleic acid, e.g., a template nucleic acid). Alt-HDR is distinct from canonical HDR in that the process utilizes different pathways from canonical HDR, and can be inhibited by the canonical HDR mediators, RAD51 and BRCA2. Also, alt-HDR uses a single-stranded or nicked homologous nucleic acid for repair of the break.

[0156] “ALT-NHEJ” or “alternative NHEJ”, or alternative non-homologous end joining, as used herein, is a type of alternative end joining repair process, and utilizes a different pathway than that of canonical NHEJ. In alternative NHEJ, a small degree of resection occurs at the break ends on both sides of the break to reveal single-stranded overhangs. Ligation or annealing of the overhangs results in the deletion of sequence. ALT-NHEJ is a category that includes microhomology-mediated end joining (MMEJ), blunt end joining (EJ), and synthesis-dependent microhomology-mediated end joining (SD-MMEJ). In MMEJ, microhomologies, or short spans of homologous sequences, e.g., 5 nucleotides or more, on the single-strand are aligned to guide repair, and leads to the deletion of sequence between the microhomologies.

[0157] “Amino acids” as used herein encompasses the canonical amino acids as well as analogs thereof. “Canonical HDR,” or canonical homology-directed repair, as used herein, refers to the process of repairing DNA damage using a homologous nucleic acid (e.g., an endogenous homologous sequence, e.g., a sister chromatid, or an exogenous nucleic acid, e.g., a template nucleic acid). Canonical HDR typically acts when there has been significant resection at the double-strand break, forming at least one single stranded portion of DNA. In a normal cell, HDR typically involves a series of steps such as recognition of the break, stabilization of the break, resection, stabilization of single stranded DNA, formation of a DNA crossover intermediate, resolution of the crossover intermediate, and ligation. The process requires RAD51 and BRCA2, and the homologous nucleic acid is typically double-stranded.

[0158] “Canonical NHEJ”, or canonical non-homologous end joining, as used herein, refers to the process of repairing double-strand breaks in which the break ends are directly ligated. This process does not require a homologous nucleic acid to guide the repair, and can result in deletion or insertion of one or more nucleotides. This process requires the Ku heterodimer (Ku70/Ku80), the catalytic subunit of DNA-PK (DN-PKcs), and/or DNA ligase XRCC4/LIG4. Unless indicated otherwise, the term “HDR” as used herein encompasses canonical HDR and alt-HDR.

[0159] A “Cas9 molecule,” as used herein, refers to a Cas9 polypeptide or a nucleic acid encoding a Cas9 polypeptide. A “Cas9 polypeptide” is a polypeptide that can interact with a gRNA molecule and, in concert with the gRNA molecule, localize to a site comprising a target domain and, in certain embodiments, a PAM sequence. Cas9 molecules include both naturally occurring Cas9 molecules and Cas9 molecules and engineered, altered, or modified Cas9 molecules or Cas9 polypeptides that differ, e.g., by at least one amino acid residue, from a reference sequence, e.g., the most similar naturally occurring Cas9 molecule. (The terms altered, engineered or modified, as used in this context, refer merely to a difference from a reference or naturally occurring sequence, and impose no specific process or origin limitations.) A Cas9 molecule may be a Cas9 polypeptide or a nucleic acid encoding a Cas9 polypeptide. A Cas9 molecule may be a nuclease (an enzyme that cleaves both strands of a double-stranded nucleic acid), a nickase (an enzyme that cleaves one strand of a double-stranded nucleic acid), or an enzymatically inactive (or dead) Cas9 molecule. A Cas9 molecule having nuclease or nickase activity is referred to as an “enzymatically active Cas9 molecule” (an “eaCas9” molecule). A Cas9 molecule lacking the ability to cleave target nucleic acid is referred to as an “enzymatically inactive Cas9 molecule” (an “eiCas9” molecule).

[0160] In certain embodiments, a Cas9 molecule meets one or both of the following criteria: it has at least 20, 30, 40, 50, 55, 60, 65, 70, 75, 80, 81, 82, 83, 84, 85, 86, 87, 88, 89, 90, 91, 92, 93, 94, 95, 96, 97, 98, 99, or 100% homology with, or it differs by no more than 1, 2, 3, 4, 5, 6, 7, 8, 9, 10, 11, 12, 13, 14, 15, 16, 17, 18, 19, 20, 25, 30, 35, 40, 35, 50, 55, 60, 65, 70, 75, 80, 85, 90, 95, 100, 150, 200, 250, 300, 350 or 400, amino acid residues from, the amino acid sequence of a reference sequences, e.g., naturally occurring Cas9 molecule.

[0161] In certain embodiments, a Cas9 molecule meets one or both of the following criteria: it has at least 20, 30, 40, 50, 55, 60, 65, 70, 75, 80, 81, 82, 83, 84, 85, 86, 87, 88, 89, 90, 91, 92, 93, 94, 95, 96, 97, 98, 99, or 100% homology with, or it differs by no more than 1, 2, 3, 4, 5, 6, 7, 8, 9, 10, 11, 12, 13, 14, 15, 16, 17, 18, 19, 20, 25, 30, 35, 40, 35, 50, 55, 60, 65, 70, 75, 80, 85, 90, 95, 100, 150, 200, 250, 300, 350 or 400, amino acid residues from, the amino acid sequence of a reference sequences, e.g., naturally-occurring Cas9 molecule.

[0162] In certain embodiments, each domain of the Cas9 molecule (e.g., the domains named herein) will, independently have: at least 20, 30, 40, 50, 55, 60, 65, 70, 75, 80, 81, 82, 83, 84, 85, 86, 87, 88, 89, 90, 91, 92, 93, 94, 95, 96, 97, 98, 99, or 100% homology with such a domain described herein. In certain embodiments at least 1, 2, 3, 4, 5, of 6 domains will have, independently, at least 50, 60, 70, 80, 81, 82, 83, 84, 85, 86, 87, 88, 89, 90, 91, 92, 93, 94, 95, 96, 97, 98, 99, or 100% homology with a corresponding domain, while any remaining domains will be absent, or have less homology to their corresponding naturally occurring domains.

[0163] In certain embodiments, the Cas9 molecule is a S. pyogenes Cas9 variant. In certain embodiments, the Cas9 variant is the EQR variant. In certain embodiments, the Cas9 variant is the VRER variant. In certain embodiments, the eiCas9 molecule is a S. pyogenes Cas9 variant. In certain embodiments, the Cas9 variant is the EQR variant. In certain embodiments, the Cas9 variant is the VRER variant. In certain embodiments, a Cas9 system comprises a Cas9 molecule, e.g., a Cas9 molecule described herein, e.g., the Cas9 EQR variant or the Cas9 VRER variant.

[0164] In certain embodiments, the Cas9 molecule is a S. aureus Cas9 variant. In certain embodiments, the Cas9 variant is the KKH (E782K/N968K/R1015H) variant (see, e.g., Kleinstiver 2015, the entire contents of which are expressly incorporated herein by reference). In certain embodiments, the Cas9 variant is the E782K/K929R/R1015H variant (see, e.g., Kleinstiver 2015). In certain embodiments, the Cas9 variant is the E782K/K929R/N968K/R1015H variant (see, e.g., Kleinstiver 2015). In certain embodiments the Cas9 variant comprises one or more mutations in one of the following residues: E782, K929, N968, R1015. In certain embodiments the Cas9 variant comprises one or more of the following mutations: E782K, K929R, N968K, R1015H and R1015Q (see, e.g., Kleinstiver 2015). In certain embodiments, a Cas9 system comprises a Cas9 molecule, e.g., a Cas9 molecule described herein, e.g., the Cas9 KKH variant.

[0165] As used herein, the term “Cas9 system” refers to a system capable of altering a target nucleic acid by one of many DNA repair pathways. In certain embodiments, the Cas9 system described herein promotes repair of a target nucleic acid via an HDR pathway. In some embodiments, a Cas9 system comprises a gRNA and a Cas9 molecule. In some embodiments, a Cas9 system further comprises a second gRNA. In yet another embodiment, a Cas9 system comprises a gRNA, a Cas9 molecule, and a second gRNA. In some embodiments, a Cas9 system comprises a gRNA, two Cas9 molecules, and a second gRNA. In some embodiments, a Cas9 system comprises a first gRNA, a second gRNA, a first Cas9 molecule, and a second Cas9 molecule. In some embodiments, a Cas9 system further comprises a template nucleic acid.

[0166] As used herein, the term “cleavage event” refers to a break in a nucleic acid molecule. A cleavage event may be a single-strand cleavage event, or a double-strand cleavage event. A single-strand cleavage event may result in a 5′ overhang or a 3′ overhang. A double-stranded cleavage event may result in blunt ends, two 5′ overhangs, or two 3′ overhangs.

[0167] A disorder “caused by” a mutation, as used herein, refers to a disorder that is made more likely or severe by the presence of the mutation, compared to a subject that does not have the mutation. The mutation need not be the only cause of a disorder, i.e., the disorder can still be caused by the mutation even if other causes, such as environmental factors or lifestyle factors, contribute causally to the disorder. In embodiments, the disorder is caused by the mutation if the mutation is a medically recognized risk factor for developing the disorder, and/or if a study has found that the mutation contributes causally to development of the disorder.

[0168] “Derived from”, as used herein, refers to the source or origin of a molecular entity, e.g., a nucleic acid or protein. The source of a molecular entity may be naturally-occurring, recombinant, unpurified, or a purified molecular entity. For example, a polypeptide that is derived from a second polypeptide comprises an amino acid sequence that is identical or substantially similar, e.g., is more than 50% homologous to, the amino acid sequence of the second protein. The derived molecular entity, e.g., a nucleic acid or protein, can comprise one or more modifications, e.g., one or more amino acid or nucleotide changes.

[0169] “Domain,” as used herein, is used to describe a segment of, or a portion of a protein or nucleic acid. Unless otherwise indicated, a domain is not required to have any specific functional property.

[0170] Calculations of homology or sequence identity between two sequences (the terms are used interchangeably herein) are performed as follows. The sequences are aligned for optimal comparison purposes (e.g., gaps can be introduced in one or both of a first and a second amino acid or nucleic acid sequence for optimal alignment and non-homologous sequences can be disregarded for comparison purposes). The optimal alignment is determined as the best score using the GAP program in the GCG software package with a Blossum 62 scoring matrix with a gap penalty of 12, a gap extend penalty of 4, and a frame shift gap penalty of 5. The amino acid residues or nucleotides at corresponding amino acid positions or nucleotide positions are then compared. When a position in the first sequence is occupied by the same amino acid residue or nucleotide as the corresponding position in the second sequence, then the molecules are identical at that position. The percent identity between the two sequences is a function of the number of identical positions shared by the sequences.

[0171] As used herein, the term “endogenous” gene, “endogenous” nucleic acid, or “endogenous” homologous region refers to a native gene, nucleic acid, or region of a gene, which is in its natural location in the genome, e.g., chromosome or plasmid, of a cell. In contrast, the term “exogenous” gene or “exogenous” nucleic acid refers to a gene, nucleic acid, or region of a gene which is not native within a cell, but which is introduced into the cell during the methods of the invention. An exogenous gene or exogenous nucleic acid may be homologous to, or identical to, an endogenous gene or an endogenous nucleic acid.

[0172] As used herein, the term “endogenous homologous region” refers to an endogenous template nucleic acid sequence which is homologous to at least a portion of a target gene, and which can be used in conjunction with a Cas9 molecule and a gRNA molecule to modify, e.g., correct, a sequence of the target gene. In one embodiment, the endogenous homologous region is DNA. In another embodiment, the endogenous homologous region is double stranded DNA. In another embodiment, the endogenous homologous region is single stranded DNA. In one embodiment, the endogenous homologous region is at least 70%, 75%, 80%, 81%, 82%, 83%, 84%, 85%, 86%, 875, 885, 89%, 90%, 91%, 92%, 93%, 94%, 95%, 96%, 9%, 98%, or 99% homologous to at least a portion of the target gene.

[0173] As used herein, “error-prone” repair refers to a DNA repair process that has a higher tendency to introduce mutations into the site being repaired. For instance, alt-NHEJ and SSA are error-prone pathways; C-NHEJ is also error prone because it sometimes leads to the creation of a small degree of alteration of the site (even though in some instances C-NHEJ results in error-free repair); and HR, alt-HR, and SSA in the case of a single-strand oligo donor are not error-prone.

[0174] As used herein, the term “gRNA molecule” or “gRNA” refers to a guide RNA which is capable of targeting a Cas9 molecule to a target nucleic acid. In one embodiment, the term “gRNA molecule” refers to a guide ribonucleic acid. In another embodiment, the term “gRNA molecule” refers to a nucleic acid encoding a gRNA. In one embodiment, a gRNA molecule is non-naturally occurring. In one embodiment, a gRNA molecule is a synthetic gRNA molecule.

[0175] “Governing gRNA molecule,” as used herein, refers to a gRNA molecule that comprises a targeting domain that is complementary to a target domain on a nucleic acid that comprises a sequence that encodes a component of the CRISPR/Cas system that is introduced into a cell or subject. A governing gRNA does not target an endogenous cell or subject sequence. In an embodiment, a governing gRNA molecule comprises a targeting domain that is complementary with a target sequence on: (a) a nucleic acid that encodes a Cas9 molecule; (b) a nucleic acid that encodes a gRNA molecule which comprises a targeting domain that targets the HBB gene (a target gene gRNA); or on more than one nucleic acid that encodes a CRISPR/Cas component, e.g., both (a) and (b). In an embodiment, a nucleic acid molecule that encodes a CRISPR/Cas component, e.g., that encodes a Cas9 molecule or a target gene gRNA molecule, comprises more than one target domain that is complementary with a governing gRNA targeting domain. While not wishing to be bound by theory, it is believed that a governing gRNA molecule complexes with a Cas9 molecule and results in Cas9 mediated inactivation of the targeted nucleic acid, e.g., by cleavage or by binding to the nucleic acid, and results in cessation or reduction of the production of a CRISPR/Cas system component. In an embodiment, the Cas9 molecule forms two complexes: a complex comprising a Cas9 molecule with a target gene gRNA molecule, which complex will alter the HBB gene; and a complex comprising a Cas9 molecule with a governing gRNA molecule, which complex will act to prevent further production of a CRISPR/Cas system component, e.g., a Cas9 molecule or a target gene gRNA molecule. In an embodiment, a governing gRNA molecule/Cas9 molecule complex binds to or promotes cleavage of a control region sequence, e.g., a promoter, operably linked to a sequence that encodes a Cas9 molecule, a sequence that encodes a transcribed region, an exon, or an intron, for the Cas9 molecule. In an embodiment, a governing gRNA molecule/Cas9 molecule complex binds to or promotes cleavage of a control region sequence, e.g., a promoter, operably linked to a gRNA molecule, or a sequence that encodes the gRNA molecule. In an embodiment, the governing gRNA molecule, e.g., a Cas9-targeting governing gRNA molecule, or a target gene gRNA-targeting governing gRNA molecule, limits the effect of the Cas9 molecule/target gene gRNA molecule complex-mediated gene targeting. In an embodiment, a governing gRNA places temporal, level of expression, or other limits, on activity of the Cas9 molecule/target gene gRNA molecule complex. In an embodiment, a governing gRNA reduces off-target or other unwanted activity. In an embodiment, a governing gRNA molecule inhibits, e.g., entirely or substantially entirely inhibits, the production of a component of the Cas9 system and thereby limits, or governs, its activity.

[0176] “HDR”, or homology-directed repair, as used herein, refers to the process of repairing DNA damage using a homologous nucleic acid (e.g., an endogenous nucleic acid, e.g., a sister chromatid, or an exogenous nucleic acid, e.g., a template nucleic acid). HDR typically occurs when there has been significant resection at a double-strand break, forming at least one single stranded portion of DNA. HDR is a category that includes, for example, single-strand annealing (SSA), homologous recombination (HR), single strand template repair (SST-R), and a third, not yet fully characterized alternative homologous recombination (alt-HR) DNA repair pathway. In some embodiments, HDR includes gene conversion and gene correction. In some embodiments, the term HDR does not encompass canonical NHEJ (C-NHEJ). In some embodiments, the term HDR does not encompass alternative non-homologous end joining (Alt-NHEJ) (e.g., blunt end-joining (blunt EJ), (micro homology mediated end joining (MMEJ), and synthesis dependent microhomology-mediated end joining (SD-MMEJ)).

[0177] The terms “homology” or “identity,” as used interchangeably herein, refer to sequence identity between two amino acid sequences or two nucleic acid sequences, with identity being a more strict comparison. The phrases “percent identity or homology” and “% identity or homology” refer to the percentage of sequence identity found in a comparison of two or more amino acid sequences or nucleic acid sequences. Two or more sequences can be anywhere from 0-100% identical, or any value there between. Identity can be determined by comparing a position in each sequence that can be aligned for purposes of comparison to a reference sequence. When a position in the compared sequence is occupied by the same nucleotide base or amino acid, then the molecules are identical at that position. A degree of identity of amino acid sequences is a function of the number of identical amino acids at positions shared by the amino acid sequences. A degree of identity between nucleic acid sequences is a function of the number of identical or matching nucleotides at positions shared by the nucleic acid sequences. A degree of homology of amino acid sequences is a function of the number of amino acids at positions shared by the polypeptide sequences.

[0178] Calculations of homology or sequence identity between two sequences (the terms are used interchangeably herein) are performed as follows. The sequences are aligned for optimal comparison purposes (e.g., gaps can be introduced in one or both of a first and a second amino acid or nucleic acid sequence for optimal alignment and non-homologous sequences can be disregarded for comparison purposes). The optimal alignment is determined as the best score using the GAP program in the GCG software package with a Blossum 62 scoring matrix with a gap penalty of 12, a gap extend penalty of 4, and a frame shift gap penalty of 5. The amino acid residues or nucleotides at corresponding amino acid positions or nucleotide positions are then compared. When a position in the first sequence is occupied by the same amino acid residue or nucleotide as the corresponding position in the second sequence, then the molecules are identical at that position. The percent identity between the two sequences is a function of the number of identical positions shared by the sequences.

[0179] “Gene conversion”, as used herein, refers to the process of repairing DNA damage by homology directed recombination (HDR) using an endogenous nucleic acid, e.g., a sister chromatid or a plasmid, as a template nucleic acid. Without being bound by theory, in some embodiments, BRCA1, BRCA2 and/or RAD51 are believed to be involved in gene conversion. In some embodiments, the endogenous nucleic acid is a nucleic acid sequence having homology, e.g., significant homology, with a fragment of DNA proximal to the site of the DNA lesion or mutation. In some embodiments, the template is not an exogenous nucleic acid.

[0180] “Gene correction”, as used herein, refers to the process of repairing DNA damage by homology directed recombination using an exogenous nucleic acid, e.g., a donor template nucleic acid. In some embodiments, the exogenous nucleic acid is single-stranded. In some embodiments, the exogenous nucleic acid is double-stranded.

[0181] “Homologous recombination” or “HR” refers to a type of HDR DNA-repair which typically acts occurs when there has been significant resection at the double-strand break, forming at least one single stranded portion of DNA. In a normal cell, HR typically involves a series of steps such as recognition of the break, stabilization of the break, resection, stabilization of single stranded DNA, formation of a DNA crossover intermediate, resolution of the crossover intermediate, and ligation. The process requires RAD51 and BRCA2, and the homologous nucleic acid is typically double-stranded. In some embodiments, homologous recombination includes gene conversion.

[0182] “Modulator,” as used herein, refers to an entity, e.g., a compound, that can alter the activity (e.g., enzymatic activity, transcriptional activity, or translational activity), amount, distribution, or structure of a subject molecule or genetic sequence. In an embodiment, modulation comprises cleavage, e.g., breaking of a covalent or non-covalent bond, or the forming of a covalent or non-covalent bond, e.g., the attachment of a moiety, to the subject molecule. In an embodiment, a modulator alters the, three dimensional, secondary, tertiary, or quaternary structure, of a subject molecule. A modulator can increase, decrease, initiate, or eliminate a subject activity.

[0183] As used herein, the term “mutation” refers to a change in the sequence of a nucleic acid as compared to a wild-type sequence of the nucleic acid, resulting a variant form of the nucleic acid. A mutation in a nucleic acid may be caused by the alteration of a single base pair in the nucleic acid, or the insertion, deletion, or rearrangement of larger sections of the nucleic acid. A mutation in a gene may result in variants of the protein encoded by the gene which are associated with genetic disorders. For example, a mutation (e.g., GAG 4 GTG) results in the substitution of valine for glutamic acid at amino acid position 6 in exon 1 of the HBB gene. This mutation in the HBB gene is associated with beta thalassemia and sickle cell disease.

[0184] “Non-homologous end joining” or “NHEJ,” as used herein, refers to ligation mediated repair and/or non-template mediated repair including canonical NHEJ (cNHEJ), alternative NHEJ (altNHEJ), microhomology-mediated end joining (MMEJ), single-strand annealing (SSA), and synthesis-dependent microhomology-mediated end joining (SD-MMEJ). Unless indicate otherwise, “NHEJ” as used herein encompasses canonical NHEJ, alt-NHEJ, MMEJ, SSA and SD-MMEJ.

[0185] “Polypeptide,” as used herein, refers to a polymer of amino acids.

[0186] As used herein, the term “processing,” with respect to overhangs, refers to either the endonucleolytic processing or the exonucleolytic processing of a break in a nucleic acid molecule. In one embodiment, processing of a 5′ overhang in a nucleic acid molecule may result in a 3′ overhang. In another embodiment, processing of a 3′ overhang in a nucleic acid molecule may result in a 5′ overhang.

[0187] A “reference molecule,” as used herein, refers to a molecule to which a modified or candidate molecule is compared. For example, a reference Cas9 molecule refers to a Cas9 molecule to which a modified or candidate Cas9 molecule is compared. The modified or candidate molecule may me compared to the reference molecule on the basis of sequence (e.g., the modified or candidate may have X % sequence identity or homology with the reference molecule) or activity (e.g., the modified or candidate molecule may have X % of the activity of the reference molecule). For example, where the reference molecule is a Cas9 molecule, a modified or candidate may be characterized as having no more than 10% of the nuclease activity of the reference Cas9 molecule. Examples of reference Cas9 molecules include naturally occurring unmodified Cas9 molecules, e.g., a naturally occurring Cas9 molecule from S. pyogenes, S. aureus, S. thermophilus or N. meningitidis. In certain embodiments, the reference Cas9 molecule is the naturally occurring Cas9 molecule having the closest sequence identity or homology with the modified or candidate Cas9 molecule to which it is being compared. In certain embodiments, the reference Cas9 molecule is a parental molecule having a naturally occurring or known sequence on which a mutation has been made to arrive at the modified or candidate Cas9 molecule.

[0188] “Replacement,” or “replaced,” as used herein with reference to a modification of a molecule does not require a process limitation but merely indicates that the replacement entity is present.

[0189] “Resection”, as used herein, refers to exonuclease-mediated digestion of one strand of a double-stranded DNA molecule, which results in a single-stranded overhang. Resection may occur, e.g., on one or both sides of a double-stranded break. Resection can be measured by, for instance, extracting genomic DNA, digesting it with an enzyme that selectively degrades dsDNA, and performing quantitative PCR using primers spanning the DSB site, e.g., as described herein.

[0190] “SSA” or “Single-strand Annealing”, as used herein, refers to the process where RAD52 as opposed to RAD51 in the HR pathways, binds to the single stranded portion of DNA and promotes annealing of the two single stranded DNA segments at repetitive regions. Once RAD52 binds XFP/ERCC1 removes DNA flaps to make the DNA more suitable for ligation.

[0191] “SCD target point position,” as used herein, refers to a target position in the HBB gene, typically a single nucleotide, which, if mutated, can result in a protein having a mutant amino acid and give rise to SCD. In an embodiment, the SCD target position is the target position at which a change can give rise to an E6 mutant protein, e.g., a protein having an E6V substitution.

[0192] “Subject,” as used herein, may mean either a human or non-human animal. The term includes, but is not limited to, mammals (e.g., humans, other primates, pigs, rodents (e.g., mice and rats or hamsters), rabbits, guinea pigs, cows, horses, cats, dogs, sheep, and goats). In an embodiment, the subject is a human. In another embodiment, the subject is poultry. In another embodiment, the subject is piscine. In certain embodiments, the subject is a human, and in certain of these embodiments the human is an infant, child, young adult, or adult.

[0193] As used herein, the terms “target nucleic acid” or “target gene” refer to a nucleic acid which is being targeted for alteration, e.g., by gene conversion, by a Cas9 system described herein. In certain embodiments, a target nucleic acid comprises one gene. In certain embodiments, a target nucleic acid may comprise one or more genes, e.g., two genes, three genes, four genes, or five genes. In one embodiment, a target nucleic acid may comprise a promoter region, or control region, of a gene. In one embodiment, a target nucleic acid may comprise an intron of a gene. In another embodiment, a target nucleic acid may comprise an exon of a gene. In one embodiment, a target nucleic acid may comprise a coding region of gene. In one embodiment, a target nucleic acid may comprise a non-coding region of a gene. In some embodiments, the target gene is an HBB gene. In other embodiments, the target gene is an SMN1 gene. In some embodiments, the target gene is an NCF1 (p47-PHOX) gene.

[0194] “Target position” as used herein, refers to a site on a target nucleic acid that is modified by a Cas9 molecule-dependent process. For example, the target position can be modified by a Cas9 molecule-mediated cleavage of the target nucleic acid and template nucleic acid directed modification, e.g., correction, of the target position. In an embodiment, a target position can be a site between two nucleotides, e.g., adjacent nucleotides, on the target nucleic acid into which one or more nucleotides is added based on homology with a template nucleic acid. The target position may comprise one or more nucleotides that are altered, e.g., corrected, based on homology with a template nucleic acid. In another embodiment, the target position may comprise one or more nucleotides that are deleted based on homology with a template nucleic acid. In an embodiment, the target position is within a “target sequence” (e.g., the sequence to which the gRNA binds). In an embodiment, a target position is upstream or downstream of a target sequence (e.g., the sequence to which the gRNA binds).

[0195] “Target region,” “target domain,” or “target sequence,” as used herein, is a nucleic acid sequence that comprises a target position and at least one nucleotide position outside the target position. In certain embodiments, the target position is flanked by sequences of the target position region, i.e., the target position is disposed in the target position region such that there are target position region sequences both 5′ and 3′ to the target position. In certain embodiments, the target position region provides sufficient sequences on each side (i.e., 5′ and 3′) of the target position to allow gene conversion of the target position, wherein the gene conversion uses an endogenous sequence homologous with the target position region as a template.

[0196] A “template nucleic acid,” as the term is used herein, refers to a nucleic acid sequence which can be used in conjunction with a Cas9 molecule and a gRNA molecule to alter the structure of a target position. In an embodiment, the target nucleic acid is modified to have the some or all of the sequence of the template nucleic acid, typically at or near cleavage site(s). In an embodiment, the template nucleic acid is single stranded. In an alternate embodiment, the template nucleic acid is double stranded. In an embodiment, the template nucleic acid is DNA, e.g., double stranded DNA. In an alternate embodiment, the template nucleic acid is single stranded DNA. In an embodiment, the template nucleic acid is RNA, e.g., double stranded RNA or single stranded RNA. In an embodiment, the template nucleic acid is encoded on the same vector backbone, e.g., AAV genome, plasmid DNA, as the Cas9 and gRNA. In an embodiment, the template nucleic acid is excised from a vector backbone in vivo, e.g., it is flanked by gRNA recognition sequences. In one embodiment, the template DNA is in an ILDV. In one embodiment, the template nucleic acid is an exogenous nucleic acid sequence. In another embodiment, the template nucleic acid sequence is an endogenous nucleic acid sequence, e.g., an endogenhous homologous region. In one embodiment, the template nucleic acid is a single stranded oligonucleotide corresponding to a plus strand of a nucleic acid sequence. In another embodiment, the template nucleic acid is a single stranded oligonucleotide corresponding to a minus strand of a nucleic acid sequence.

[0197] “Treat,” “treating” and “treatment,” as used herein, mean the treatment of a disease in a mammal, e.g., in a human, including (a) inhibiting the disease, i.e., arresting or preventing its development or progression; (b) relieving the disease, i.e., causing regression of the disease state; and (c) relieving one or more symptoms of the disease; and (d) curing the disease.

[0198] “Prevent,” “preventing” and “prevention,” as used herein, means the prevention of a disease in a mammal, e.g., in a human, including (a) avoiding or precluding the disease; (b) affecting the predisposition toward the disease (c) preventing or delaying the onset of at least one symptom of the disease.

[0199] An “up-regulator”, as used herein, refers to an agent that directly increases the activity of a specified biological pathway. Directly increasing the activity of the pathway refers to (i) the up-regulator binding to a component of that pathway (e.g., a protein that acts in the pathway or an mRNA encoding that protein) and increasing the level or activity of that component, e.g., by increasing the concentration or specific activity of that component, or (ii) the up-regulator is an added amount of a component that is ordinarily present in the pathway at a given level, e.g., an overexpressed protein. An up-regulator may, e.g., speed up one of the steps of that pathway or increase the level or activity of a component in that pathway. An up-regulator may be, e.g., a protein in the pathway, e.g., one may overexpress a protein that is ordinarily in the pathway to increase the overall activity of the pathway. The pathway may be, e.g., a DNA damage repair pathway, for example, HDR, e.g., gene conversion. In an embodiment, the increased level or activity is compared to what would be seen in the absence of the up-regulator.

[0200] “Wild type”, as used herein, refers to a gene or polypeptide which has the characteristics, e.g., the nucleotide or amino acid sequence, of a gene or polypeptide from a naturally-occurring source. The term “wild type” typically includes the most frequent observation of a particular gene or polypeptide in a population of organisms found in nature.

[0201] “X” as used herein in the context of an amino acid sequence, refers to any amino acid (e.g., any of the twenty natural amino acids) unless otherwise specified.

[0202] Sickle Cell Disease and Methods of Repairing Mutation(s) in the HBB Gene

[0203] Sickle Cell Disease (SCD), also known as Sickle Cell Anemia (SCA), is a common inherited hematologic disease which affects 80,000-90,000 people in the United States. It is common in people of African descent and in Hispanic-Americans, with the prevalence of SCD being 1 in 500 and 1 in 1,000, respectively.

[0204] SCD is caused by a mutation in the beta-globin (HBB) gene. HBB is located on chromosome 11 within the HBB gene cluster, which includes genes encoding the delta globin chain, A gamma chain, G gamma chain. The alpha-globin gene is located on chromosome 16. A point mutation (e.g., GAG→GTG) results in the substitution of valine for glutamic acid at amino acid position 6 in exon 1 of the HBB gene. Beta hemoglobin chains with this mutation are expressed as HbS. The disease is inherited in an autosomal recessive manner, so that only patients with two HbS alleles have SCD. Subjects who have sickle cell trait (are heterozygous for HbS) only display a phenotype if they are severely dehydrated or oxygen deprived.

[0205] Normal adult hemoglobin (Hb) is composed of a tetramer made from two alpha-globin chains and two beta-globin chains. In SCD, the valine at position 6 of the beta-chain is hydrophobic and causes a change in conformation of the beta-globin protein when it is not bound to oxygen. HbS is more likely to polymerize and leads to the characteristic sickle shaped red blood cells (RBCs) found in SCD.

[0206] Sickle shape RBCs cause multiple manifestations of disease, which include, e.g., anemia, sickle cell crises, vaso-occlusive crises, aplastic crises and acute chest syndrome. The disease has various manifestations, e.g., vaso-occlusive crisis, splenic sequestration crisis and anemia. Subjects may also suffer from acute chest crisis and infarcts of extremities, end organs and central nervous system. Current treatments for SCD include, e.g., hydration, transfusion, analgesics, the use of hydroxyurea, supplementation with folic acid, penicillin prophylaxis during childhood, and bone marrow transplants. However, there remains a need for additional methods and compositions that can be used to cure, not just treat, sickle cell disease and other genetic diseases.

[0207] One approach to treat or prevent SCD is to repair (i.e., correct) one or more mutations in the HBB gene. In this approach, mutant HBB allele(s) are corrected and restored to wild type state. While not wishing to be bound by theory, it is believed that correction of the glutamic acid to valine substitution at amino acid 6 in the beta-globin gene restores wild type beta-globin production within erythroid cells. The instant disclosure provides methods for modifying target genes, such as HBB, for repair by gene conversion using an endogenous homologous region, such as a region of the HBD gene. Specifically, the instant disclosure increases the rates of repair by gene conversion as compared to previously disclosed technologies. The methods described herein can be performed in all cell types, including mammalian and human cells. Specifically with respect to SCD, beta-globin is expressed in cells of erythroid cell lineage. Thus, in one embodiment, an erythroid cell is targeted.

[0208] While much of the disclosure herein is presented in the context of the mutation in the HBB gene that gives rise to an E6 mutant protein (e.g., E6V mutant protein), the methods and compositions herein are broadly applicable to any mutation, e.g., a point mutation or a deletion, in any gene, including promoters and control regions of a gene, that gives rise to any disease.

[0209] In an embodiment, one HBB allele is repaired in the subject. In another embodiment, both HBB alleles are repaired in the subject. In either situation, the subject can be cured of disease. As the disease only displays a phenotype when both alleles are mutated, repair of a single allele is adequate for a cure.

[0210] In one aspect, methods and compositions discussed herein, provide for the correction of the underlying genetic cause of SCD, e.g., the correction of a mutation at a target position in the HBB gene, e.g., correction of a mutation at amino acid position 6, e.g., an E6V substitution in the HBB gene.

[0211] In an embodiment, the method provides for the correction of a mutation at a target position in the HBB gene, e.g., correction of a mutation at amino acid position 6, e.g., an E6V substitution in the HBB gene. As described herein, in one embodiment, the method comprises the introduction of one or more breaks (e.g., single-strand breaks or double-strand breaks) sufficiently close to (e.g., either 5′ or 3′ to) the target position in the HBB gene, e.g., E6V.

[0212] In an embodiment, the targeting domain of the gRNA molecule is configured to provide a cleavage event, e.g., a double-strand break or a single-strand break, sufficiently close to (e.g., either 5′ or 3′ to) the target position in the HBB gene, e.g., E6V to allow correction, e.g., an alteration in the HBB gene, e.g., an alternation associated with HDR. In an embodiment, the targeting domain is configured such that a cleavage event, e.g., a double-strand or single-strand break, is positioned within 1, 2, 3, 4, 5, 10, 15, 20, 25, 30, 35, 40, 45, 50, 60, 70, 80, 90, 100, 150, 200, 250, 300, 350, 400, 450 or 500 nucleotides of a the target position in the HBB gene, e.g., E6V. The break, e.g., a double-strand or single-strand break, can be positioned upstream or downstream of the target position in the HBB gene, e.g., E6V.

[0213] In an embodiment, a second, third and/or fourth gRNA molecule is configured to provide a cleavage event, e.g., a double-strand break or a single-strand break, sufficiently close to (e.g., either 5′ or 3′ to) the target position in the HBB gene, e.g., E6V to allow correction, e.g., an alteration associated with HDR in the HBB gene. In an embodiment, the targeting domain is configured such that a cleavage event, e.g., a double-strand or single-strand break, is positioned within 1, 2, 3, 4, 5, 10, 15, 20, 25, 30, 35, 40, 45, 50, 60, 70, 80, 90, 100, 150, 200, 250, 300, 350, 400, 450 or 500 nucleotides of a the target position in the HBB gene, e.g., E6V. The break, e.g., a double-strand or single-strand break, can be positioned upstream or downstream of the target position in the HBB gene, e.g., E6V.

[0214] In an embodiment, a single-strand break is accompanied by an additional single-strand break, positioned by a second, third and/or fourth gRNA molecule, as discussed below. For example, the targeting domains bind configured such that a cleavage event, e.g., the two single-strand breaks, are positioned within 1, 2, 3, 4, 5, 10, 15, 20, 25, 30, 35, 40, 45, 50, 60, 70, 80, 90, 100, 150, 200, 250, 300, 350, 400, 450 or 500 nucleotides of the target position in the HBB gene, e.g., E6V. In an embodiment, the first and second gRNA molecules are configured such, that when guiding a Cas9 nickase, a single-strand break is accompanied by an additional single-strand break, positioned by a second gRNA molecule, sufficiently close to one another to result in an alteration of the target position in the HBB gene, e.g., E6V. In an embodiment, the first and second gRNA molecules are configured such that a single-strand break positioned by said second gRNA is within 10, 20, 30, 40, or 50 nucleotides of the break positioned by said first gRNA molecule, e.g., when the Cas9 is a nickase. In an embodiment, the two gRNA molecules are configured to position cuts at the same position, or within a few nucleotides of one another, on different strands, e.g., essentially mimicking a double-strand break.

[0215] In an embodiment, a double-strand break can be accompanied by an additional double-strand break, positioned by a second, third and/or fourth gRNA molecule, as is discussed below. For example, the targeting domain of a first gRNA molecule is configured such that a double-strand break is positioned upstream of the target position in the HBB gene, e.g., E6V, e.g., within 1, 2, 3, 4, 5, 10, 15, 20, 25, 30, 35, 40, 45, 50, 60, 70, 80, 90, 100, 150, 200, 250, 300, 350, 400, 450 or 500 nucleotides of the target position; and the targeting domain of a second gRNA molecule is configured such that a double-strand break is positioned downstream the target position in the HBB gene, e.g., E6V, e.g., within 1, 2, 3, 4, 5, 10, 15, 20, 25, 30, 35, 40, 45, 50, 60, 70, 80, 90, 100, 150, 200, 250, 300, 350, 400, 450 or 500 nucleotides of the target position.

[0216] In an embodiment, a double-strand break can be accompanied by two additional single-strand breaks, positioned by a second gRNA molecule and a third gRNA molecule. For example, the targeting domain of a first gRNA molecule is configured such that a double-strand break is positioned upstream of the target position in the HBB gene, e.g., E6V, e.g., within 1, 2, 3, 4, 5, 10, 15, 20, 25, 30, 35, 40, 45, 50, 60, 70, 80, 90, 100, 150, 200, 250, 300, 350, 400, 450 or 500 nucleotides of the target position; and the targeting domains of a second and third gRNA molecule are configured such that two single-strand breaks are positioned downstream of the target position in the HBB gene, e.g., E6V, e.g., within 1, 2, 3, 4, 5, 10, 15, 20, 25, 30, 35, 40, 45, 50, 60, 70, 80, 90, 100, 150, 200, 250, 300, 350, 400, 450 or 500 nucleotides of the target position. In an embodiment, the targeting domain of the first, second and third gRNA molecules are configured such that a cleavage event, e.g., a double-strand or single-strand break, is positioned, independently for each of the gRNA molecules.

[0217] In an embodiment, a first and second single-strand breaks can be accompanied by two additional single-strand breaks positioned by a third gRNA molecule and a fourth gRNA molecule. For example, the targeting domain of a first and second gRNA molecule are configured such that two single-strand breaks are positioned upstream of the target position in the HBB gene, e.g., E6V, e.g., within 1, 2, 3, 4, 5, 10, 15, 20, 25, 30, 35, 40, 45, 50, 60, 70, 80, 90, 100, 150, 200, 250, 300, 350, 400, 450 or 500 nucleotides of the target position in the HBB gene, e.g., E6V; and the targeting domains of a third and fourth gRNA molecule are configured such that two single-strand breaks are positioned downstream of the target position in the HBB gene, e.g., E6V, e.g., within 1, 2, 3, 4, 5, 10, 15, 20, 25, 30, 35, 40, 45, 50, 60, 70, 80, 90, 100, 150, 200, 250, 300, 350, 400, 450 or 500 nucleotides of the target position in the HBB gene, e.g., E6V.

[0218] In an embodiment, a mutation in the HBB gene, e.g., E6V is corrected using an exogenously provided template nucleic acid, e.g., by HDR. In another embodiment, a mutation in the HBB gene, e.g., E6V is corrected without using an exogenously provided template nucleic acid, e.g., by HDR. In an embodiment, alteration of the target sequence occurs with an endogenous genomic donor sequence, e.g., by HDR. In an embodiment, the endogenous genomic donor sequence comprises one or more nucleotides derived from the HBD gene. In an embodiment, a mutation in the HBB gene, e.g., E6V is corrected by an endogenous genomic donor sequence (e.g., an HBD gene). In an embodiment, an eaCas9 molecule, e.g., an eaCas9 molecule described herein, is used. In an embodiment, the eaCas9 molecule comprises HNH-like domain cleavage activity but has no, or no significant, N-terminal RuvC-like domain cleavage activity. In an embodiment, the eaCas9 molecule is an HNH-like domain nickase. In an embodiment, the eaCas9 molecule comprises a mutation at D10 (e.g., D10A). In an embodiment, the eaCas9 molecule comprises N-terminal RuvC-like domain cleavage activity but has no, or no significant, HNH-like domain cleavage activity. In an embodiment, the eaCas9 molecule is an N-terminal RuvC-like domain nickase. In an embodiment, the eaCas9 molecule comprises a mutation at H840 (e.g., H840A) or N863 (e.g., N863A).

[0219] Methods to Treat or Prevent Sickle Cell Disease (SCD)

[0220] Disclosed herein are the approaches to treat or prevent SCD, using the compositions and methods described herein.

[0221] One approach to treat or prevent disease, e.g., SCD, is to repair (i.e., correct) one or more mutations in a target gene, e.g., a HBB gene, e.g., by gene conversion, using an endogenous homologous region. In this approach, mutant HBB allele(s) are corrected and restored to wild type state. While not wishing to be bound by theory, it is believed that correction of the glutamic acid to valine substitution at amino acid 6 in the beta-globin gene restores wild type beta-globin production within erythroid cells. The method described herein can be performed in all cell types. Beta-globin is expressed in cells of erythroid cell lineage. In an embodiment, an erythroid cell is targeted.

[0222] In an embodiment, one HBB allele is repaired in the subject. In another embodiment, both HBB alleles are repaired in the subject. In either situation, the subjects can be cured of disease. As the disease only displays a phenotype when both alleles are mutated, repair of a single allele is adequate for a cure.

[0223] In an embodiment, the method comprises initiating treatment of a subject prior to disease onset.

[0224] In an embodiment, the method comprises initiating treatment of a subject after disease onset.

[0225] In an embodiment, the method comprises initiating treatment of a subject well after disease onset, e.g., 1, 2, 3, 4, 5, 6, 7, 8, 9, 10, 12, 16, 24, 36, 48 or more months after onset of disease. While not wishing to be bound by theory it is believed that this treatment may be effective if subjects present well into the course of illness.

[0226] In an embodiment, the method comprises initiating treatment of a subject in an advanced stage of disease.

[0227] Overall, initiation of treatment for subjects at all stages of disease is expected to prevent negative consequences of disease and be of benefit to subjects.

[0228] In an embodiment, the method comprises initiating treatment of a subject prior to disease expression. In an embodiment, the method comprises initiating treatment of a subject in an early stage of disease, e.g., when a subject has tested positive for beta-thalassemia mutations but has no signs or symptoms associated with beta-thalassemia major, minor or intermedia.

[0229] In an embodiment, the method comprises initiating treatment of a subject at the appearance of microcytic anemia, e.g., in an infant, child, adult or young adult.

[0230] In an embodiment, the method comprises initiating treatment of a subject who is transfusion-dependent.

[0231] In an embodiment, the method comprises initiating treatment of a subject who has tested positive for a mutation in a beta globin gene.

[0232] In an embodiment, the method comprises initiating treatment at the appearance of any one or more of the following findings associated or consistent with beta-thalassemia major or beta-thalassemia minor: anemia, diarrhea, fever, failure to thrive, frontal bossing, broken long bones, hepatomegaly, splenomegaly, thrombosis, pulmonary embolus, stroke, leg ulcer, cardiomyopathy, cardiac arrhythmia, and evidence of extramedullary erythropoiesis.

[0233] In an embodiment, a cell is treated, e.g., ex vivo. In an embodiment, an ex vivo treated cell is returned to a subject.

[0234] In an embodiment, allogenic or autologous bone marrow or erythroid cells are treated ex vivo. In an embodiment, an ex vivo treated allogenic or autologous bone marrow or erythroid cells are administered to the subject. In an embodiment, an erythroid cell, e.g., an autologous erythroid cell, is treated ex vivo and returned to the subject. In an embodiment, an autologous stem cell, is treated ex vivo and returned to the subject. In an embodiment, the modified HSCs are administered to the patient following no myeloablative pre-conditioning. In an embodiment, the modified HSCs are administered to the patient following mild myeloablative pre-conditioning such that following engraftment, some of the hematopoietic cells are derived from the modified HSCs. In other aspects, the HSCs are administered after full myeloablation such that following engraftment, 100% of the hematopoietic cells are derived from the modified HSCs.

[0235] In an embodiment, the method comprises delivery of a gRNA molecule and Cas9 molecule by intravenous injection, intramuscular injection, subcutaneous injection, or intra-bone marrow (IBM) injection.

[0236] In an embodiment, the method comprises delivery of a gRNA molecule and/or a Cas9 molecule by an AAV. In an embodiment, the method comprises delivery of a gRNA molecule and/or a Cas9 molecule by a lentivirus. In an embodiment, the method comprises delivery of a gRNA molecule and/or a Cas9 molecule by a nanoparticle. In an embodiment, the method comprises delivery of a gRNA molecule by a parvovirus, e.g., a modified parvovirus specifically designed to target bone marrow cells and/or CD4⁺ cells. In an embodiment, two or more gRNA molecules (e.g., a second, third or fourth gRNA molecules) are delivered.

[0237] Other Methods to Treat Sickle Cell Disease

[0238] In healthy individuals, two beta-globin molecules pair with two alpha-globin molecules to form normal hemoglobin (Hb). In SCD, mutations in the beta-globin (HBB) gene, e.g., a point mutation (GAG→GTG) that results in the substitution of valine for glutamic acid at amino acid position 6 of the beta-globin molecule, cause production of sickle hemoglobin (HbS). HbS is more likely to polymerize and leads to the characteristic sickle shaped red blood cells (RBCs). Sickle shaped RBCs give rise to multiple manifestations of disease, such as, anemia, sickle cell crises, vaso-occlusive crises, aplastic crises and acute chest syndrome. Alpha-globin can also pair with fetal hemoglobin (HbF), which significantly moderates the severe anemia and other symptoms of SCD. However, the expression of HbF is negatively regulated by the BCL11A gene product.

[0239] Methods and compositions disclosed herein provide a number of approaches for treating SCD. As is discussed infra, methods described herein provide for treating SCD by correcting a target position in the HBB gene to provide corrected, or functional, e.g., wild type, beta-globin. Methods and compositions discussed herein can be used in combination with targeting a second gene, e.g., a gene other than the HBB gene, e.g., the BCL11A gene (also known as B-cell CLL/lymphoma 11A, BCL11A-L, BCL11A-S, BCL11A-XL, CTIP1, HBFQTL5 and ZNF), e.g., by a CRISPR/Cas related method. BCL11A encodes a zinc-finger protein that is involved in the regulation of globin gene expression. By altering the BCL11A gene (e.g., one or both alleles of the BCL11A gene), the levels of gamma globin can be increased. Gamma globin can replace beta globin in the hemoglobin complex and effectively carry oxygen to tissues, thereby ameliorating SCD disease phenotypes. Altering the BCL11A gene herein refers to reducing or eliminating (1) BCL11A gene expression, (2) BCL11A protein function, or (3) the level of BCL11A protein. In an embodiment, an SCD target knockdown position is targeted. In another embodiment, an SCD target knockdown position is targeted.

[0240] “SCD target knockout position”, as used herein, refers to a position in the BCL11A gene, which if altered, e.g., disrupted by insertion or deletion of one or more nucleotides, e.g., by NHEJ-mediated alteration, results in reduction or elimination of expression of functional BCL11A gene product. In an embodiment, the position is in the BCL11A coding region, e.g., an early coding region. In an embodiment, the position is in the BCL11A non-coding region, e.g., an enhancer region.

[0241] “SCD target knockdown position”, as used herein, refers to a position, e.g., in the BCL11A gene, which if targeted by an eiCas9 or an eiCas9 fusion described herein, results in reduction or elimination of expression of functional BCL11A gene product. In an embodiment, transcription is reduced or eliminated. In an embodiment, the position is in the BCL11A promoter sequence. In an embodiment, a position in the promoter sequence of the BCL11A gene is targeted by an enzymatically inactive Cas9 (eiCas9) or an eiCas9-fusion protein, as described herein.

I. Guide RNA (gRNA) Molecules

[0242] A gRNA molecule, as that term is used herein, refers to a nucleic acid that promotes the specific targeting or homing of a gRNA molecule/Cas9 molecule complex to a target nucleic acid. gRNA molecules can be unimolecular (having a single RNA molecule) (e.g., chimeric or modular (comprising more than one, and typically two, separate RNA molecules). The gRNA molecules provided herein comprise a targeting domain comprising, consisting of, or consisting essentially of a nucleic acid sequence fully or partially complementary to a target domain. In certain embodiments, the gRNA molecule further comprises one or more additional domains, including for example a first complementarity domain, a linking domain, a second complementarity domain, a proximal domain, a tail domain, and a 5′ extension domain. Each of these domains is discussed in detail below. Additional details on gRNAs are provided in Section I entitled “gRNA molecules” of PCT Application WO 2015/048577, the entire contents of which are expressly incorporated herein by reference. In certain embodiments, one or more of the domains in the gRNA molecule comprises an amino acid sequence identical to or sharing sequence homology with a naturally occurring sequence, e.g., from S. pyogenes, S. aureus, or S. thermophilus.

[0243] In certain embodiments, a unimolecular, or chimeric, gRNA comprises, preferably from 5′ to 3′:
[0244] a targeting domain complementary to a target domain in a HBB gene, e.g., a targeting domain from any of SEQ ID NOs: 387-485, 6803-6871, or 16010-16256;
[0245] a first complementarity domain;
[0246] a linking domain;
[0247] a second complementarity domain (which is complementary to the first complementarity domain);
[0248] a proximal domain; and
[0249] optionally, a tail domain.

[0250] In certain embodiments, a modular gRNA comprises:
[0251] a first strand comprising, preferably from 5′ to 3′:
   [0252] a targeting domain (which is complementary to a target domain in the HBB gene), e.g., a targeting domain from any one of SEQ ID NOs: 387-485, 6803-6871, or 16010-16256; and
   [0253] a first complementarity domain; and
[0254] a second strand, comprising, preferably from 5′ to 3′:
   [0255] optionally, a 5′ extension domain;
   [0256] a second complementarity domain;
   [0257] a proximal domain; and
   [0258] optionally, a tail domain.

[0259] Each of these domains are described in more detail, below.

[0260] Targeting Domain

[0261] The targeting domain (sometimes referred to alternatively as the guide sequence or complementarity region) comprises, consists of, or consists essentially of a nucleic acid sequence that is complementary or partially complementary to a target nucleic acid sequence, e.g., a target nucleic acid sequence in a HBB target gene. The nucleic acid sequence in a target gene, e.g., HBB, to which all or a portion of the targeting domain is complementary or partially complementary is referred to herein as the target domain. In certain embodiments, the target domain comprises a target position within the target gene, e.g., HBB. In other embodiments, a target position lies outside (i.e., upstream or downstream of) the target domain. In certain embodiments, the target domain is located entirely within a target gene, e.g., in a coding region, an intron, or an exon. In other embodiments, all or part of the target domain is located outside of a target gene, e.g., in a control region or in a non-coding region.

[0262] Methods for selecting targeting domains are known in the art (see, e.g., Fu 2014; Sternberg 2014). Examples of suitable targeting domains for use in the methods, compositions, and kits described herein include those set forth in SEQ ID NOs: 387-485, 6803-6871, or 16010-16256.

[0263] The strand of the target nucleic acid comprising the target domain is referred to herein as the “complementary strand” because it is complementary to the targeting domain sequence. Since the targeting domain is part of a gRNA molecule, it comprises the base uracil (U) rather than thymine (T); conversely, any DNA molecule encoding the gRNA molecule will comprise thymine rather than uracil. In a targeting domain/target domain pair, the uracil bases in the targeting domain will pair with the adenine bases in the target domain. In certain embodiments, the degree of complementarity between the targeting domain and target domain is sufficient to allow targeting of a Cas9 molecule to the target nucleic acid.

[0264] In certain embodiments, the targeting domain comprises a core domain and an optional secondary domain. In certain of these embodiments, the core domain is located 3′ to the secondary domain, and in certain of these embodiments the core domain is located at or near the 3′ end of the targeting domain. In certain of these embodiments, the core domain consists of or consists essentially of about 8 to about 13 nucleotides at the 3′ end of the targeting domain. In certain embodiments, only the core domain is complementary or partially complementary to the corresponding portion of the target domain, and in certain of these embodiments the core domain is fully complementary to the corresponding portion of the target domain. In other embodiments, the secondary domain is also complementary or partially complementary to a portion of the target domain. In certain embodiments, the core domain is complementary or partially complementary to a core domain target in the target domain, while the secondary domain is complementary or partially complementary to a secondary domain target in the target domain. In certain embodiments, the core domain and secondary domain have the same degree of complementarity with their respective corresponding portions of the target domain. In other embodiments, the degree of complementarity between the core domain and its target and the degree of complementarity between the secondary domain and its target may differ. In certain of these embodiments, the core domain may have a higher degree of complementarity for its target than the secondary domain, whereas in other embodiments the secondary domain may have a higher degree of complementarity than the core domain.

[0265] In certain embodiments, the targeting domain and/or the core domain within the targeting domain is 3 to 100, 5 to 100, 10 to 100, or 20 to 100 nucleotides in length, and in certain of these embodiments the targeting domain or core domain is 3 to 15, 3 to 20, 5 to 20, 10 to 20, 15 to 20, 5 to 50, 10 to 50, or 20 to 50 nucleotides in length. In certain embodiments, the targeting domain and/or the core domain within the targeting domain is 6, 7, 8, 9, 10, 11, 12, 13, 14, 15, 16, 17, 18, 19, 20, 21, 22, 23, 24, 25, or 26 nucleotides in length. In certain embodiments, the targeting domain and/or the core domain within the targeting domain is 6+/−2, 7+/−2, 8+/−2, 9+/−2, 10+/−2, 10+/−4, 10+/−5, 11+/−2, 12+/−2, 13+/−2, 14+/−2, 15+/−2, or 16⁺-2, 20+/−5, 30+/−5, 40+/−5, 50+/−5, 60+/−5, 70+/−5, 80+/−5, 90+/−5, or 100+/−5 nucleotides in length.

[0266] In certain embodiments wherein the targeting domain includes a core domain, the core domain is 3 to 20 nucleotides in length, and in certain of these embodiments the core domain 5 to 15 or 8 to 13 nucleotides in length. In certain embodiments wherein the targeting domain includes a secondary domain, the secondary domain is 0, 1, 2, 3, 4, 5, 6, 7, 8, 9, 10, 11, 12, 13, 14 or 15 nucleotides in length. In certain embodiments wherein the targeting domain comprises a core domain that is 8 to 13 nucleotides in length, the targeting domain is 26, 25, 24, 23, 22, 21, 20, 19, 18, 17, or 16 nucleotides in length, and the secondary domain is 13 to 18, 12 to 17, 11 to 16, 10 to 15, 9 to 14, 8 to 13, 7 to 12, 6 to 11, 5 to 10, 4 to 9, or 3 to 8 nucleotides in length, respectively.

[0267] In certain embodiments, the targeting domain is fully complementary to the target domain. Likewise, where the targeting domain comprises a core domain and/or a secondary domain, in certain embodiments one or both of the core domain and the secondary domain are fully complementary to the corresponding portions of the target domain. In other embodiments, the targeting domain is partially complementary to the target domain, and in certain of these embodiments where the targeting domain comprises a core domain and/or a secondary domain, one or both of the core domain and the secondary domain are partially complementary to the corresponding portions of the target domain. In certain of these embodiments, the nucleic acid sequence of the targeting domain, or the core domain or targeting domain within the targeting domain, is at least 80%, 85%, 90%, or 95% complementary to the target domain or to the corresponding portion of the target domain. In certain embodiments, the targeting domain and/or the core or secondary domains within the targeting domain include one or more nucleotides that are not complementary with the target domain or a portion thereof, and in certain of these embodiments the targeting domain and/or the core or secondary domains within the targeting domain include 1, 2, 3, 4, 5, 6, 7, or 8 nucleotides that are not complementary with the target domain. In certain embodiments, the core domain includes 1, 2, 3, 4, or 5 nucleotides that are not complementary with the corresponding portion of the target domain. In certain embodiments wherein the targeting domain includes one or more nucleotides that are not complementary with the target domain, one or more of said non-complementary nucleotides are located within five nucleotides of the 5′ or 3′ end of the targeting domain. In certain of these embodiments, the targeting domain includes 1, 2, 3, 4, or 5 nucleotides within five nucleotides of its 5′ end, 3′ end, or both its 5′ and 3′ ends that are not complementary to the target domain. In certain embodiments wherein the targeting domain includes two or more nucleotides that are not complementary to the target domain, two or more of said non-complementary nucleotides are adjacent to one another, and in certain of these embodiments the two or more consecutive non-complementary nucleotides are located within five nucleotides of the 5′ or 3′ end of the targeting domain. In other embodiments, the two or more consecutive non-complementary nucleotides are both located more than five nucleotides from the 5′ and 3′ ends of the targeting domain.

[0268] In an embodiment, the gRNA molecule, e.g., a gRNA molecule comprising a targeting domain, which is complementary with the HBB gene, is a modular gRNA molecule. In another embodiment, the gRNA molecule is a unimolecular or chimeric gRNA molecule.

[0269] In an embodiment, the nucleic acid encodes a gRNA molecule, e.g., the first gRNA molecule, comprising a targeting domain comprising a sequence that is the same as, or differs by no more than 1, 2, 3, 4, or 5 nucleotides from, a targeting domain sequence described herein, e.g., a targeting domain sequence from any one of Tables 1-3. In an embodiment, the nucleic acid encodes a gRNA molecule comprising a targeting domain described herein, e.g., selected from those in Tables 1-3.

[0270] In certain embodiments, the targeting domain comprises 16 nucleotides. In certain embodiments, the targeting domain comprises 17 nucleotides. In certain embodiments, the targeting domain comprises 18 nucleotides. In certain embodiments, the targeting domain comprises 19 nucleotides. In certain embodiments, the targeting domain comprises 20 nucleotides. In certain embodiments, the targeting domain comprises 21 nucleotides. In certain embodiments, the targeting domain comprises 22 nucleotides. In certain embodiments, the targeting domain comprises 23 nucleotides. In certain embodiments, the targeting domain comprises 24 nucleotides. In certain embodiments, the targeting domain comprises 25 nucleotides. In certain embodiments, the targeting domain comprises 26 nucleotides.

[0271] In certain embodiments, the targeting domain which is complementary with the HBB gene is 16 nucleotides or more in length. In certain embodiments, the targeting domain is 16 nucleotides in length. In certain embodiments, the targeting domain is 17 nucleotides in length. In another embodiment, the targeting domain is 18 nucleotides in length. In still another embodiment, the targeting domain is 19 nucleotides in length. In still another embodiment, the targeting domain is 20 nucleotides in length. In still another embodiment, the targeting domain is 21 nucleotides in length. In still another embodiment, the targeting domain is 22 nucleotides in length. In still another embodiment, the targeting domain is 23 nucleotides in length. In still another embodiment, the targeting domain is 24 nucleotides in length. In still another embodiment, the targeting domain is 25 nucleotides in length. In still another embodiment, the targeting domain is 26 nucleotides in length.

[0272] In an embodiment, a nucleic acid encodes a modular gRNA molecule, e.g., one or more nucleic acids encode a modular gRNA molecule. In another embodiment, a nucleic acid encodes a chimeric gRNA molecule. The nucleic acid may encode a gRNA molecule, e.g., the first gRNA molecule, comprising a targeting domain comprising 16 nucleotides or more in length. In one embodiment, the nucleic acid encodes a gRNA molecule, e.g., the first gRNA molecule, comprising a targeting domain that is 16 nucleotides in length. In another embodiment, the nucleic acid encodes a gRNA molecule, e.g., the first gRNA molecule, comprising a targeting domain that is 17 nucleotides in length. In still another embodiment, the nucleic acid encodes a gRNA molecule, e.g., the first gRNA molecule, comprising a targeting domain that is 18 nucleotides in length. In still another embodiment, the nucleic acid encodes a gRNA molecule, e.g., the first gRNA molecule, comprising a targeting domain that is 19 nucleotides in length. In still another embodiment, the nucleic acid encodes a gRNA molecule, e.g., the first gRNA molecule, comprising a targeting domain that is 20 nucleotides in length. In still another embodiment, the nucleic acid encodes a gRNA molecule, e.g., the first gRNA molecule, comprising a targeting domain that is 21 nucleotides in length. In still another embodiment, the nucleic acid encodes a gRNA molecule, e.g., the first gRNA molecule, comprising a targeting domain that is 22 nucleotides in length. In still another embodiment, the nucleic acid encodes a gRNA molecule, e.g., the first gRNA molecule, comprising a targeting domain that is 23 nucleotides in length. In still another embodiment, the nucleic acid encodes a gRNA molecule, e.g., the first gRNA molecule, comprising a targeting domain that is 24 nucleotides in length. In still another embodiment, the nucleic acid encodes a gRNA molecule, e.g., the first gRNA molecule, comprising a targeting domain that is 25 nucleotides in length. In still another embodiment, the nucleic acid encodes a gRNA molecule, e.g., the first gRNA molecule, comprising a targeting domain that is 26 nucleotides in length.

[0273] In certain embodiments, the targeting domain, core domain, and/or secondary domain do not comprise any modifications. In other embodiments, the targeting domain, core domain, and/or secondary domain, or one or more nucleotides therein, have a modification, including but not limited to the modifications set forth below. In certain embodiments, one or more nucleotides of the targeting domain, core domain, and/or secondary domain may comprise a 2′ modification (e.g., a modification at the 2′ position on ribose), e.g., a 2-acetylation, e.g., a 2′ methylation. In certain embodiments, the backbone of the targeting domain can be modified with a phosphorothioate. In certain embodiments, modifications to one or more nucleotides of the targeting domain, core domain, and/or secondary domain render the targeting domain and/or the gRNA comprising the targeting domain less susceptible to degradation or more bio-compatible, e.g., less immunogenic. In certain embodiments, the targeting domain and/or the core or secondary domains include 1, 2, 3, 4, 5, 6, 7, or 8 or more modifications, and in certain of these embodiments the targeting domain and/or core or secondary domains include 1, 2, 3, or 4 modifications within five nucleotides of their respective 5′ ends and/or 1, 2, 3, or 4 modifications within five nucleotides of their respective 3′ ends. In certain embodiments, the targeting domain and/or the core or secondary domains comprise modifications at two or more consecutive nucleotides.

[0274] In certain embodiments wherein the targeting domain includes core and secondary domains, the core and secondary domains contain the same number of modifications. In certain of these embodiments, both domains are free of modifications. In other embodiments, the core domain includes more modifications than the secondary domain, or vice versa.

[0275] In certain embodiments, modifications to one or more nucleotides in the targeting domain, including in the core or secondary domains, are selected to not interfere with targeting efficacy, which can be evaluated by testing a candidate modification using a system as set forth below. gRNAs having a candidate targeting domain having a selected length, sequence, degree of complementarity, or degree of modification can be evaluated using a system as set forth below. The candidate targeting domain can be placed, either alone or with one or more other candidate changes in a gRNA molecule/Cas9 molecule system known to be functional with a selected target, and evaluated.

[0276] In certain embodiments, all of the modified nucleotides are complementary to and capable of hybridizing to corresponding nucleotides present in the target domain. In another embodiment, 1, 2, 3, 4, 5, 6, 7 or 8 or more modified nucleotides are not complementary to or capable of hybridizing to corresponding nucleotides present in the target domain.

[0277] First and Second Complementarity Domains

[0278] The first and second complementarity (sometimes referred to alternatively as the crRNA-derived hairpin sequence and tracrRNA-derived hairpin sequences, respectively) domains are fully or partially complementary to one another. In certain embodiments, the degree of complementarity is sufficient for the two domains to form a duplexed region under at least some physiological conditions. In certain embodiments, the degree of complementarity between the first and second complementarity domains, together with other properties of the gRNA, is sufficient to allow targeting of a Cas9 molecule to a target nucleic acid.

[0279] In certain embodiments the first and/or second complementarity domain includes one or more nucleotides that lack complementarity with the corresponding complementarity domain. In certain embodiments, the first and/or second complementarity domain includes 1, 2, 3, 4, 5, or 6 nucleotides that do not complement with the corresponding complementarity domain. For example, the second complementarity domain may contain 1, 2, 3, 4, 5, or 6 nucleotides that do not pair with corresponding nucleotides in the first complementarity domain. In certain embodiments, the nucleotides on the first or second complementarity domain that do not complement with the corresponding complementarity domain loop out from the duplex formed between the first and second complementarity domains. In certain of these embodiments, the unpaired loop-out is located on the second complementarity domain, and in certain of these embodiments the unpaired region begins 1, 2, 3, 4, 5, or 6 nucleotides from the 5′ end of the second complementarity domain.

[0280] In certain embodiments, the first complementarity domain is 5 to 30, 5 to 25, 7 to 25, 5 to 24, 5 to 23, 7 to 22, 5 to 22, 5 to 21, 5 to 20, 7 to 18, 7 to 15, 9 to 16, or 10 to 14 nucleotides in length, and in certain of these embodiments the first complementarity domain is 5, 6, 7, 8, 9, 10, 11, 12, 13, 14, 15, 16, 17, 18, 19, 20, 21, 22, 23, 24, or 25 nucleotides in length. In certain embodiments, the second complementarity domain is 5 to 27, 7 to 27, 7 to 25, 5 to 24, 5 to 23, 5 to 22, 5 to 21, 7 to 20, 5 to 20, 7 to 18, 7 to 17, 9 to 16, or 10 to 14 nucleotides in length, and in certain of these embodiments the second complementarity domain is 5, 6, 7, 8, 9, 10, 11, 12, 13, 14, 15, 16, 17, 18, 19, 20, 21, 22, 23, 24, 25, or 26 nucleotides in length. In certain embodiments, the first and second complementarity domains are each independently 6+/−2, 7+/−2, 8+/−2, 9+/−2, 10+/−2, 11+/−2, 12+/−2, 13+/−2, 14+/−2, 15+/−2, 16+/−2, 17+/−2, 18+/−2, 19+/−2, or 20+/−2, 21+/−2, 22+/−2, 23+/−2, or 24+/−2 nucleotides in length. In certain embodiments, the second complementarity domain is longer than the first complementarity domain, e.g., 2, 3, 4, 5, or 6 nucleotides longer.

[0281] In certain embodiments, the first and/or second complementarity domains each independently comprise three subdomains, which, in the 5′ to 3′ direction are: a 5′ subdomain, a central subdomain, and a 3′ subdomain. In certain embodiments, the 5′ subdomain and 3′ subdomain of the first complementarity domain are fully or partially complementary to the 3′ subdomain and 5′ subdomain, respectively, of the second complementarity domain.

[0282] In certain embodiments, the 5′ subdomain of the first complementarity domain is 4 to 9 nucleotides in length, and in certain of these embodiments the 5′ domain is 4, 5, 6, 7, 8, or 9 nucleotides in length. In certain embodiments, the 5′ subdomain of the second complementarity domain is 3 to 25, 4 to 22, 4 to 18, or 4 to 10 nucleotides in length, and in certain of these embodiments the 5′ domain is 3, 4, 5, 6, 7, 8, 9, 10, 11, 12, 13, 14, 15, 16, 17, 18, 19, 20, 21, 22, 23, 24, or 25 nucleotides in length. In certain embodiments, the central subdomain of the first complementarity domain is 1, 2, or 3 nucleotides in length. In certain embodiments, the central subdomain of the second complementarity domain is 1, 2, 3, 4, or 5 nucleotides in length. In certain embodiments, the 3′ subdomain of the first complementarity domain is 3 to 25, 4 to 22, 4 to 18, or 4 to 10 nucleotides in length, and in certain of these embodiments the 3′ subdomain is 3, 4, 5, 6, 7, 8, 9, 10, 11, 12, 13, 14, 15, 16, 17, 18, 19, 20, 21, 22, 23, 24, or 25 nucleotides in length. In certain embodiments, the 3′ subdomain of the second complementarity domain is 4 to 9, e.g., 4, 5, 6, 7, 8 or 9 nucleotides in length.

[0283] The first and/or second complementarity domains can share homology with, or be derived from, naturally occurring or reference first and/or second complementarity domain. In certain of these embodiments, the first and/or second complementarity domains have at least 50%, 60%, 70%, 80%, 85%, 90%, or 95% homology with, or differ by no more than 1, 2, 3, 4, 5, or 6 nucleotides from, the naturally occurring or reference first and/or second complementarity domain. In certain of these embodiments, the first and/or second complementarity domains may have at least 50%, 60%, 70%, 80%, 85%, 90%, or 95% homology with homology with a first and/or second complementarity domain from S. pyogenes or S. aureus.

[0284] In certain embodiments, the first and/or second complementarity domains do not comprise any modifications. In other embodiments, the first and/or second complementarity domains or one or more nucleotides therein have a modification, including but not limited to a modification set forth below. In certain embodiments, one or more nucleotides of the first and/or second complementarity domain may comprise a 2′ modification (e.g., a modification at the 2′ position on ribose), e.g., a 2-acetylation, e.g., a 2′ methylation. In certain embodiments, the backbone of the targeting domain can be modified with a phosphorothioate. In certain embodiments, modifications to one or more nucleotides of the first and/or second complementarity domain render the first and/or second complementarity domain and/or the gRNA comprising the first and/or second complementarity less susceptible to degradation or more bio-compatible, e.g., less immunogenic. In certain embodiments, the first and/or second complementarity domains each independently include 1, 2, 3, 4, 5, 6, 7, or 8 or more modifications, and in certain of these embodiments the first and/or second complementarity domains each independently include 1, 2, 3, or 4 modifications within five nucleotides of their respective 5′ ends, 3′ ends, or both their 5′ and 3′ ends. In other embodiments, the first and/or second complementarity domains each independently contain no modifications within five nucleotides of their respective 5′ ends, 3′ ends, or both their 5′ and 3′ ends. In certain embodiments, one or both of the first and second complementarity domains comprise modifications at two or more consecutive nucleotides.

[0285] In certain embodiments, modifications to one or more nucleotides in the first and/or second complementarity domains are selected to not interfere with targeting efficacy, which can be evaluated by testing a candidate modification in a system as set forth below. gRNAs having a candidate first or second complementarity domain having a selected length, sequence, degree of complementarity, or degree of modification can be evaluated in a system as set forth below. The candidate complementarity domain can be placed, either alone or with one or more other candidate changes in a gRNA molecule/Cas9 molecule system known to be functional with a selected target, and evaluated.

[0286] In certain embodiments, the duplexed region formed by the first and second complementarity domains is, for example, 6, 7, 8, 9, 10, 11, 12, 13, 14, 15, 16, 17, 18, 19, 20, 21, or 22 bp in length, excluding any looped out or unpaired nucleotides.

[0287] In certain embodiments, the first and second complementarity domains, when duplexed, comprise 11 paired nucleotides (see, for e.g., gRNA of SEQ ID NO:5). In certain embodiments, the first and second complementarity domains, when duplexed, comprise 15 paired nucleotides (see, e.g., gRNA of SEQ ID NO:27). In certain embodiments, the first and second complementarity domains, when duplexed, comprise 16 paired nucleotides (see, e.g., gRNA of SEQ ID NO:28). In certain embodiments, the first and second complementarity domains, when duplexed, comprise 21 paired nucleotides (see, e.g., gRNA of SEQ ID NO:29).

[0288] In certain embodiments, one or more nucleotides are exchanged between the first and second complementarity domains to remove poly-U tracts. For example, nucleotides 23 and 48 or nucleotides 26 and 45 of the gRNA of SEQ ID NO:5 may be exchanged to generate the gRNA of SEQ ID NOs:30 or 31, respectively. Similarly, nucleotides 23 and 39 of the gRNA of SEQ ID NO:29 may be exchanged with nucleotides 50 and 68 to generate the gRNA of SEQ ID NO:32.

[0289] Linking Domain

[0290] The linking domain is disposed between and serves to link the first and second complementarity domains in a unimolecular or chimeric gRNA. In certain embodiments, part of the linking domain is from a crRNA-derived region, and another part is from a tracrRNA-derived region.

[0291] In certain embodiments, the linking domain links the first and second complementarity domains covalently. In certain of these embodiments, the linking domain consists of or comprises a covalent bond. In other embodiments, the linking domain links the first and second complementarity domains non-covalently. In certain embodiments, the linking domain is ten or fewer nucleotides in length, e.g., 1, 2, 3, 4, 5, 6, 7, 8, 9, or 10 nucleotides. In other embodiments, the linking domain is greater than 10 nucleotides in length, e.g., 11, 12, 13, 14, 15, 16, 17, 18, 19, 20, 21, 22, 23, 24, or 25 or more nucleotides. In certain embodiments, the linking domain is 2 to 50, 2 to 40, 2 to 30, 2 to 20, 2 to 10, 2 to 5, 10 to 100, 10 to 90, 10 to 80, 10 to 70, 10 to 60, 10 to 50, 10 to 40, 10 to 30, 10 to 20, 10 to 15, 20 to 100, 20 to 90, 20 to 80, 20 to 70, 20 to 60, 20 to 50, 20 to 40, 20 to 30, or 20 to 25 nucleotides in length. In certain embodiments, the linking domain is 10+/−5, 20+/−5, 20+/−10, 30+/−5, 30+/−10, 40+/−5, 40+/−10, 50+/−5, 50+/−10, 60+/−5, 60+/−10, 70+/−5, 70+/−10, 80+/−5, 80+/−10, 90+/−5, 90+/−10, 100+/−5, or 100+/−10 nucleotides in length.

[0292] In certain embodiments, the linking domain shares homology with, or is derived from, a naturally occurring sequence, e.g., the sequence of a tracrRNA that is 5′ to the second complementarity domain. In certain embodiments, the linking domain has at least 50%, 60%, 70%, 80%, 90%, or 95% homology with or differs by no more than 1, 2, 3, 4, 5, or 6 nucleotides from a linking domain disclosed herein.

[0293] In certain embodiments, the linking domain does not comprise any modifications. In other embodiments, the linking domain or one or more nucleotides therein have a modification, including but not limited to the modifications set forth below. In certain embodiments, one or more nucleotides of the linking domain may comprise a 2′ modification (e.g., a modification at the 2′ position on ribose), e.g., a 2-acetylation, e.g., a 2′ methylation. In certain embodiments, the backbone of the linking domain can be modified with a phosphorothioate. In certain embodiments, modifications to one or more nucleotides of the linking domain render the linking domain and/or the gRNA comprising the linking domain less susceptible to degradation or more bio-compatible, e.g., less immunogenic. In certain embodiments, the linking domain includes 1, 2, 3, 4, 5, 6, 7, or 8 or more modifications, and in certain of these embodiments the linking domain includes 1, 2, 3, or 4 modifications within five nucleotides of its 5′ and/or 3′ end. In certain embodiments, the linking domain comprises modifications at two or more consecutive nucleotides.

[0294] In certain embodiments, modifications to one or more nucleotides in the linking domain are selected to not interfere with targeting efficacy, which can be evaluated by testing a candidate modification in a system as set forth below. gRNAs having a candidate linking domain having a selected length, sequence, degree of complementarity, or degree of modification can be evaluated in a system as set forth below. The candidate linking domain can be placed, either alone or with one or more other candidate changes in a gRNA molecule/Cas9 molecule system known to be functional with a selected target, and evaluated.

[0295] In certain embodiments, the linking domain comprises a duplexed region, typically adjacent to or within 1, 2, or 3 nucleotides of the 3′ end of the first complementarity domain and/or the 5′ end of the second complementarity domain. In certain of these embodiments, the duplexed region of the linking region is 10+/−5, 15+/−5, 20+/−5, 20+/−10, or 30+/−5 bp in length. In certain embodiments, the duplexed region of the linking domain is 1, 2, 3, 4, 5, 6, 7, 8, 9, 10, 11, 12, 13, 14, or 15 bp in length. In certain embodiments, the sequences forming the duplexed region of the linking domain are fully complementarity. In other embodiments, one or both of the sequences forming the duplexed region contain one or more nucleotides (e.g., 1, 2, 3, 4, 5, 6, 7, or 8 nucleotides) that are not complementary with the other duplex sequence.

[0296] 5′ Extension Domain

[0297] In certain embodiments, a modular gRNA as disclosed herein comprises a 5′ extension domain, i.e., one or more additional nucleotides 5′ to the second complementarity domain. In certain embodiments, the 5′ extension domain is 2 to 10 or more, 2 to 9, 2 to 8, 2 to 7, 2 to 6, 2 to 5, or 2 to 4 nucleotides in length, and in certain of these embodiments the 5′ extension domain is 2, 3, 4, 5, 6, 7, 8, 9, or 10 or more nucleotides in length.

[0298] In certain embodiments, the 5′ extension domain nucleotides do not comprise modifications, e.g., modifications of the type provided below. However, in certain embodiments, the 5′ extension domain comprises one or more modifications, e.g., modifications that it render it less susceptible to degradation or more bio-compatible, e.g., less immunogenic. By way of example, the backbone of the 5′ extension domain can be modified with a phosphorothioate, or other modification(s) as set forth below. In certain embodiments, a nucleotide of the 5′ extension domain can comprise a 2′ modification (e.g., a modification at the 2′ position on ribose), e.g., a 2-acetylation, e.g., a 2′ methylation, or other modification(s) as set forth below.

[0299] In certain embodiments, the 5′ extension domain can comprise as many as 1, 2, 3, 4, 5, 6, 7, or 8 modifications. In certain embodiments, the 5′ extension domain comprises as many as 1, 2, 3, or 4 modifications within 5 nucleotides of its 5′ end, e.g., in a modular gRNA molecule. In certain embodiments, the 5′ extension domain comprises as many as 1, 2, 3, or 4 modifications within 5 nucleotides of its 3′ end, e.g., in a modular gRNA molecule.

[0300] In certain embodiments, the 5′ extension domain comprises modifications at two consecutive nucleotides, e.g., two consecutive nucleotides that are within 5 nucleotides of the 5′ end of the 5′ extension domain, within 5 nucleotides of the 3′ end of the 5′ extension domain, or more than 5 nucleotides away from one or both ends of the 5′ extension domain. In certain embodiments, no two consecutive nucleotides are modified within 5 nucleotides of the 5′ end of the 5′ extension domain, within 5 nucleotides of the 3′ end of the 5′ extension domain, or within a region that is more than 5 nucleotides away from one or both ends of the 5′ extension domain. In certain embodiments, no nucleotide is modified within 5 nucleotides of the 5′ end of the 5′ extension domain, within 5 nucleotides of the 3′ end of the 5′ extension domain, or within a region that is more than 5 nucleotides away from one or both ends of the 5′ extension domain.

[0301] Modifications in the 5′ extension domain can be selected so as to not interfere with gRNA molecule efficacy, which can be evaluated by testing a candidate modification in a system as set forth below. gRNAs having a candidate 5′ extension domain having a selected length, sequence, degree of complementarity, or degree of modification, can be evaluated in a system as set forth below. The candidate 5′ extension domain can be placed, either alone, or with one or more other candidate changes in a gRNA molecule/Cas9 molecule system known to be functional with a selected target and evaluated.

[0302] In certain embodiments, the 5′ extension domain has at least 60, 70, 80, 85, 90, or 95% homology with, or differs by no more than 1, 2, 3, 4, 5, or 6 nucleotides from, a reference 5′ extension domain, e.g., a naturally occurring, e.g., an S. pyogenes, S. aureus, or S. thermophilus, 5′ extension domain, or a 5′ extension domain described herein.

[0303] Proximal Domain

[0304] In certain embodiments, the proximal domain is 5 to 20 or more nucleotides in length, e.g., 5, 6, 7, 8, 9, 10, 11, 12, 13, 14, 15, 16, 17, 18, 19, 20, 21, 22, 23, 24, 25, or 26 nucleotides in length. In certain of these embodiments, the proximal domain is 6+/−2, 7+/−2, 8+/−2, 9+/−2, 10+/−2, 11+/−2, 12+/−2, 13+/−2, 14+/−2, 14+/−2, 16+/−2, 17+/−2, 18+/−2, 19+/−2, or 20+/−2 nucleotides in length. In certain embodiments, the proximal domain is 5 to 20, 7, to 18, 9 to 16, or 10 to 14 nucleotides in length.

[0305] In certain embodiments, the proximal domain can share homology with or be derived from a naturally occurring proximal domain. In certain of these embodiments, the proximal domain has at least 50%, 60%, 70%, 80%, 85%, 90%, or 95% homology with or differs by no more than 1, 2, 3, 4, 5, or 6 nucleotides from a proximal domain disclosed herein, e.g., an S. pyogenes, S. aureus, or S. thermophilus proximal domain.

[0306] In certain embodiments, the proximal domain does not comprise any modifications. In other embodiments, the proximal domain or one or more nucleotides therein have a modification, including but not limited to the modifications set forth in herein. In certain embodiments, one or more nucleotides of the proximal domain may comprise a 2′ modification (e.g., a modification at the 2′ position on ribose), e.g., a 2-acetylation, e.g., a 2′ methylation. In certain embodiments, the backbone of the proximal domain can be modified with a phosphorothioate. In certain embodiments, modifications to one or more nucleotides of the proximal domain render the proximal domain and/or the gRNA comprising the proximal domain less susceptible to degradation or more bio-compatible, e.g., less immunogenic. In certain embodiments, the proximal domain includes 1, 2, 3, 4, 5, 6, 7, or 8 or more modifications, and in certain of these embodiments the proximal domain includes 1, 2, 3, or 4 modifications within five nucleotides of its 5′ and/or 3′ end. In certain embodiments, the proximal domain comprises modifications at two or more consecutive nucleotides.

[0307] In certain embodiments, modifications to one or more nucleotides in the proximal domain are selected to not interfere with targeting efficacy, which can be evaluated by testing a candidate modification in a system as set forth below. gRNAs having a candidate proximal domain having a selected length, sequence, degree of complementarity, or degree of modification can be evaluated in a system as set forth below. The candidate proximal domain can be placed, either alone or with one or more other candidate changes in a gRNA molecule/Cas9 molecule system known to be functional with a selected target, and evaluated.

[0308] Tail Domain

[0309] A broad spectrum of tail domains are suitable for use in the gRNA molecules disclosed herein.

[0310] In certain embodiments, the tail domain is absent. In other embodiments, the tail domain is 1 to 100 or more nucleotides in length, e.g., 1, 2, 3, 4, 5, 6, 7, 8, 9, 10, 20, 30, 40, 50, 60, 70, 80, 90, or 100 nucleotides in length. In certain embodiments, the tail domain is 1 to 5, 1 to 10, 1 to 15, 1 to 20, 1 to 50, 10 to 100, 20 to 100, 10 to 90, 20 to 90, 10 to 80, 20 to 80, 10 to 70, 20 to 70, 10 to 60, 20 to 60, 10 to 50, 20 to 50, 10 to 40, 20 to 40, 10 to 30, 20 to 30, 20 to 25, 10 to 20, or 10 to 15 nucleotides in length. In certain embodiments, the tail domain is 5+/−5, 10+/−5, 20+/−10, 20+/−5, 25+/−10, 30+/−10, 30+/−5, 40+/−10, 40+/−5, 50+/−10, 50+/−5, 60+/−10, 60+/−5, 70+/−10, 70+/−5, 80+/−10, 80+/−5, 90+/−10, 90+/−5, 100+/−10, or 100+/−5 nucleotides in length,

[0311] In certain embodiments, the tail domain can share homology with or be derived from a naturally occurring tail domain or the 5′ end of a naturally occurring tail domain. In certain of these embodiments, the proximal domain has at least 50%, 60%, 70%, 80%, 85%, 90%, or 95% homology with or differs by no more than 1, 2, 3, 4, 5, or 6 nucleotides from a naturally occurring tail domain disclosed herein, e.g., an S. pyogenes, S. aureus, or S. thermophilus tail domain.

[0312] In certain embodiments, the tail domain includes sequences that are complementary to each other and which, under at least some physiological conditions, form a duplexed region. In certain of these embodiments, the tail domain comprises a tail duplex domain which can form a tail duplexed region. In certain embodiments, the tail duplexed region is 3, 4, 5, 6, 7, 8, 9, 10, 11, or 12 bp in length. In certain embodiments, the tail domain comprises a single stranded domain 3′ to the tail duplex domain that does not form a duplex. In certain of these embodiments, the single stranded domain is 3 to 10 nucleotides in length, e.g., 3, 4, 5, 6, 7, 8, 9, 10, or 4 to 6 nucleotides in length.

[0313] In certain embodiments, the tail domain does not comprise any modifications. In other embodiments, the tail domain or one or more nucleotides therein have a modification, including but not limited to the modifications set forth herein. In certain embodiments, one or more nucleotides of the tail domain may comprise a 2′ modification (e.g., a modification at the 2′ position on ribose), e.g., a 2-acetylation, e.g., a 2′ methylation. In certain embodiments, the backbone of the tail domain can be modified with a phosphorothioate. In certain embodiments, modifications to one or more nucleotides of the tail domain render the tail domain and/or the gRNA comprising the tail domain less susceptible to degradation or more bio-compatible, e.g., less immunogenic. In certain embodiments, the tail domain includes 1, 2, 3, 4, 5, 6, 7, or 8 or more modifications, and in certain of these embodiments the tail domain includes 1, 2, 3, or 4 modifications within five nucleotides of its 5′ and/or 3′ end. In certain embodiments, the tail domain comprises modifications at two or more consecutive nucleotides.

[0314] In certain embodiments, modifications to one or more nucleotides in the tail domain are selected to not interfere with targeting efficacy, which can be evaluated by testing a candidate modification as set forth below. gRNAs having a candidate tail domain having a selected length, sequence, degree of complementarity, or degree of modification can be evaluated using a system as set forth below. The candidate tail domain can be placed, either alone or with one or more other candidate changes in a gRNA molecule/Cas9 molecule system known to be functional with a selected target, and evaluated.

[0315] In certain embodiments, the tail domain includes nucleotides at the 3′ end that are related to the method of in vitro or in vivo transcription. When a T7 promoter is used for in vitro transcription of the gRNA, these nucleotides may be any nucleotides present before the 3′ end of the DNA template. When a U6 promoter is used for in vivo transcription, these nucleotides may be the sequence UUUUUU. When an H1 promoter is used for transcription, these nucleotides may be the sequence UUUU. When alternate pol-III promoters are used, these nucleotides may be various numbers of uracil bases depending on, e.g., the termination signal of the pol-III promoter, or they may include alternate bases.

[0316] In certain embodiments, the proximal and tail domain taken together comprise, consist of, or consist essentially of the sequence set forth in SEQ ID NOs: 33, 34, 35, 36, or 38.

### Exemplary Unimolecular/Chimeric gRNAs

[0317] In certain embodiments, a gRNA as disclosed herein has the structure: 5′ [targeting domain]-[first complementarity domain]-[linking domain]-[second complementarity domain]-[proximal domain]-[tail domain]-3′, wherein:

[0318] the targeting domain comprises a core domain and optionally a secondary domain, and is 10 to 50 nucleotides in length;

[0319] the first complementarity domain is 5 to 25 nucleotides in length and, in certain embodiments has at least 50, 60, 70, 80, 85, 90, or 95% homology with a reference first complementarity domain disclosed herein;

[0320] the linking domain is 1 to 5 nucleotides in length;

[0321] the second complementarity domain is 5 to 27 nucleotides in length and, in certain embodiments has at least 50, 60, 70, 80, 85, 90, or 95% homology with a reference second complementarity domain disclosed herein;

[0322] the proximal domain is 5 to 20 nucleotides in length and, in certain embodiments has at least 50, 60, 70, 80, 85, 90, or 95% homology with a reference proximal domain disclosed herein; and

[0323] the tail domain is absent or a nucleotide sequence is 1 to 50 nucleotides in length and, in certain embodiments has at least 50, 60, 70, 80, 85, 90, or 95% homology with a reference tail domain disclosed herein.

[0324] In certain embodiments, a unimolecular gRNA as disclosed herein comprises, preferably from 5′ to 3′:
[0325] a targeting domain, e.g., comprising 10-50 nucleotides;
[0326] a first complementarity domain, e.g., comprising 15, 16, 17, 18, 19, 20, 21, 22, 23, 24, 25, or 26 nucleotides;
[0327] a linking domain;
[0328] a second complementarity domain;
[0329] a proximal domain; and
[0330] a tail domain,

[0331] wherein,
[0332] (a) the proximal and tail domain, when taken together, comprise at least 15, 18, 20, 25, 30, 31, 35, 40, 45, 49, 50, or 53 nucleotides;
[0333] (b) there are at least 15, 18, 20, 25, 30, 31, 35, 40, 45, 49, 50, or 53 nucleotides 3′ to the last nucleotide of the second complementarity domain; or
[0334] (c) there are at least 16, 19, 21, 26, 31, 32, 36, 41, 46, 50, 51, or 54 nucleotides 3′ to the last nucleotide of the second complementarity domain that is complementary to its corresponding nucleotide of the first complementarity domain.

[0335] In certain embodiments, the sequence from (a), (b), and/or (c) has at least 50%, 60%, 70%, 75%, 80%, 85%, 90%, 95%, or 99% homology with the corresponding sequence of a naturally occurring gRNA, or with a gRNA described herein.

[0336] In certain embodiments, the proximal and tail domain, when taken together, comprise at least 15, 18, 20, 25, 30, 31, 35, 40, 45, 49, 50, or 53 nucleotides.

[0337] In certain embodiments, there are at least 15, 18, 20, 25, 30, 31, 35, 40, 45, 49, 50, or 53 nucleotides 3′ to the last nucleotide of the second complementarity domain.

[0338] In certain embodiments, there are at least 16, 19, 21, 26, 31, 32, 36, 41, 46, 50, 51, or 54 nucleotides 3′ to the last nucleotide of the second complementarity domain that are complementary to the corresponding nucleotides of the first complementarity domain.

[0339] In certain embodiments, the targeting domain consists of, consists essentially of, or comprises 16, 17, 18, 19, 20, 21, 22, 23, 24, 25, or 26 nucleotides (e.g., 16, 17, 18, 19, 20, 21, 22, 23, 24, 25, or 26 consecutive nucleotides) complementary or partially complementary to the target domain or a portion thereof, e.g., the targeting domain is 16, 17, 18, 19, 20, 21, 22, 23, 24, 25, or 26 nucleotides in length. In certain of these embodiments, the targeting domain is complementary to the target domain over the entire length of the targeting domain, the entire length of the target domain, or both.

[0340] In certain embodiments, a unimolecular or chimeric gRNA molecule disclosed herein (comprising a targeting domain, a first complementary domain, a linking domain, a second complementary domain, a proximal domain and, optionally, a tail domain) comprises the amino acid sequence set forth in SEQ ID NO:45, wherein the targeting domain is listed as 20 N's (residues 1-20) but may range in length from 16 to 26 nucleotides, and wherein the final six residues (residues 97-102) represent a termination signal for the U6 promoter buy may be absent or fewer in number. In certain embodiments, the unimolecular, or chimeric, gRNA molecule is a S. pyogenes gRNA molecule.

[0341] In certain embodiments, a unimolecular or chimeric gRNA molecule disclosed herein (comprising a targeting domain, a first complementary domain, a linking domain, a second complementary domain, a proximal domain and, optionally, a tail domain) comprises the amino acid sequence set forth in SEQ ID NO:40, wherein the targeting domain is listed as 20 Ns (residues 1-20) but may range in length from 16 to 26 nucleotides, and wherein the final six residues (residues 97-102) represent a termination signal for the U6 promoter but may be absent or fewer in number. In certain embodiments, the unimolecular or chimeric gRNA molecule is an S. aureus gRNA molecule.

### Exemplary Modular gRNAs

[0342] In certain embodiments, a modular gRNA disclosed herein comprises:
[0343] a first strand comprising, preferably from 5′ to 3′;
   [0344] a targeting domain, e.g., comprising 15, 16, 17, 18, 19, 20, 21, 22, 23, 24, 25, or 26 nucleotides;
   [0345] a first complementarity domain; and
[0346] a second strand, comprising, preferably from 5′ to 3′:
   [0347] optionally a 5′ extension domain;
   [0348] a second complementarity domain;
   [0349] a proximal domain; and
   [0350] a tail domain,

[0351] wherein:
[0352] (a) the proximal and tail domain, when taken together, comprise at least 15, 18, 20, 25, 30, 31, 35, 40, 45, 49, 50, or 53 nucleotides;
[0353] (b) there are at least 15, 18, 20, 25, 30, 31, 35, 40, 45, 49, 50, or 53 nucleotides 3′ to the last nucleotide of the second complementarity domain; or
[0354] (c) there are at least 16, 19, 21, 26, 31, 32, 36, 41, 46, 50, 51, or 54 nucleotides 3′ to the last nucleotide of the second complementarity domain that is complementary to its corresponding nucleotide of the first complementarity domain.

[0355] In certain embodiments, the sequence from (a), (b), or (c), has at least 60, 75, 80, 85, 90, 95, or 99% homology with the corresponding sequence of a naturally occurring gRNA, or with a gRNA described herein.

[0356] In certain embodiments, the proximal and tail domain, when taken together, comprise at least 15, 18, 20, 25, 30, 31, 35, 40, 45, 49, 50, or 53 nucleotides.

[0357] In certain embodiments, there are at least 15, 18, 20, 25, 30, 31, 35, 40, 45, 49, 50, or 53 nucleotides 3′ to the last nucleotide of the second complementarity domain.

[0358] In certain embodiments, there are at least 16, 19, 21, 26, 31, 32, 36, 41, 46, 50, 51, or 54 nucleotides 3′ to the last nucleotide of the second complementarity domain that is complementary to its corresponding nucleotide of the first complementarity domain.

[0359] In certain embodiments, the targeting domain comprises, has, or consists of, 16, 17, 18, 19, 20, 21, 22, 23, 24, 25, or 26 nucleotides (e.g., 16, 17, 18, 19, 20, 21, 22, 23, 24, 25, or 26 consecutive nucleotides) having complementarity with the target domain, e.g., the targeting domain is 16, 17, 18, 19, 20, 21, 22, 23, 24, 25, or 26 nucleotides in length.

[0360] In certain embodiments, the targeting domain consists of, consists essentially of, or comprises 16, 17, 18, 19, 20, 21, 22, 23, 24, 25, or 26 nucleotides (e.g., 16, 17, 18, 19, 20, 21, 22, 23, 24, 25, or 26 consecutive nucleotides) complementary to the target domain or a portion thereof. In certain of these embodiments, the targeting domain is complementary to the target domain over the entire length of the targeting domain, the entire length of the target domain, or both.

[0361] In certain embodiments, the targeting domain comprises, has, or consists of, 16 nucleotides (e.g., 16 consecutive nucleotides) having complementarity with the target domain, e.g., the targeting domain is 16 nucleotides in length; and the proximal and tail domain, when taken together, comprise at least 15, 18, 20, 25, 30, 31, 35, 40, 45, 49, 50, or 53 nucleotides.

[0362] In certain embodiments, the targeting domain comprises, has, or consists of, 16 nucleotides (e.g., 16 consecutive nucleotides) having complementarity with the target domain, e.g., the targeting domain is 16 nucleotides in length; and there are at least 15, 18, 20, 25, 30, 31, 35, 40, 45, 49, 50, or 53 nucleotides 3′ to the last nucleotide of the second complementarity domain.

[0363] In certain embodiments, the targeting domain comprises, has, or consists of, 16 nucleotides (e.g., 16 consecutive nucleotides) having complementarity with the target domain, e.g., the targeting domain is 16 nucleotides in length; and there are at least 16, 19, 21, 26, 31, 32, 36, 41, 46, 50, 51, or 54 nucleotides 3′ to the last nucleotide of the second complementarity domain that is complementary to its corresponding nucleotide of the first complementarity domain.

[0364] In certain embodiments, the targeting domain has, or consists of, 17 nucleotides (e.g., 17 consecutive nucleotides) having complementarity with the target domain, e.g., the targeting domain is 17 nucleotides in length; and the proximal and tail domain, when taken together, comprise at least 15, 18, 20, 25, 30, 31, 35, 40, 45, 49, 50, or 53 nucleotides.

[0365] In certain embodiments, the targeting domain has, or consists of, 17 nucleotides (e.g., 17 consecutive nucleotides) having complementarity with the target domain, e.g., the targeting domain is 17 nucleotides in length; and there are at least 15, 18, 20, 25, 30, 31, 35, 40, 45, 49, 50, or 53 nucleotides 3′ to the last nucleotide of the second complementarity domain.

[0366] In certain embodiments, the targeting domain has, or consists of, 17 nucleotides (e.g., 17 consecutive nucleotides) having complementarity with the target domain, e.g., the targeting domain is 17 nucleotides in length; and there are at least 16, 19, 21, 26, 31, 32, 36, 41, 46, 50, 51, or 54 nucleotides 3′ to the last nucleotide of the second complementarity domain that is complementary to its corresponding nucleotide of the first complementarity domain.

[0367] In certain embodiments, the targeting domain has, or consists of, 18 nucleotides (e.g., 18 consecutive nucleotides) having complementarity with the target domain, e.g., the targeting domain is 18 nucleotides in length; and the proximal and tail domain, when taken together, comprise at least 15, 18, 20, 25, 30, 31, 35, 40, 45, 49, 50, or 53 nucleotides.

[0368] In certain embodiments, the targeting domain has, or consists of, 18 nucleotides (e.g., 18 consecutive nucleotides) having complementarity with the target domain, e.g., the targeting domain is 18 nucleotides in length; and there are at least 15, 18, 20, 25, 30, 31, 35, 40, 45, 49, 50, or 53 nucleotides 3′ to the last nucleotide of the second complementarity domain.

[0369] In certain embodiments, the targeting domain has, or consists of, 18 nucleotides (e.g., 18 consecutive nucleotides) having complementarity with the target domain, e.g., the targeting domain is 18 nucleotides in length; and there are at least 16, 19, 21, 26, 31, 32, 36, 41, 46, 50, 51, or 54 nucleotides 3′ to the last nucleotide of the second complementarity domain that is complementary to its corresponding nucleotide of the first complementarity domain.

[0370] In certain embodiments, the targeting domain comprises, has, or consists of, 19 nucleotides (e.g., 19 consecutive nucleotides) having complementarity with the target domain, e.g., the targeting domain is 19 nucleotides in length; and the proximal and tail domain, when taken together, comprise at least 15, 18, 20, 25, 30, 31, 35, 40, 45, 49, 50, or 53 nucleotides.

[0371] In certain embodiments, the targeting domain comprises, has, or consists of, 19 nucleotides (e.g., 19 consecutive nucleotides) having complementarity with the target domain, e.g., the targeting domain is 19 nucleotides in length; and there are at least 15, 18, 20, 25, 30, 31, 35, 40, 45, 49, 50, or 53 nucleotides 3′ to the last nucleotide of the second complementarity domain.

[0372] In certain embodiments, the targeting domain comprises, has, or consists of, 19 nucleotides (e.g., 19 consecutive nucleotides) having complementarity with the target domain, e.g., the targeting domain is 19 nucleotides in length; and there are at least 16, 19, 21, 26, 31, 32, 36, 41, 46, 50, 51, or 54 nucleotides 3′ to the last nucleotide of the second complementarity domain that is complementary to its corresponding nucleotide of the first complementarity domain.

[0373] In certain embodiments, the targeting domain comprises, has, or consists of, 20 nucleotides (e.g., 20 consecutive nucleotides) having complementarity with the target domain, e.g., the targeting domain is 20 nucleotides in length; and the proximal and tail domain, when taken together, comprise at least 15, 18, 20, 25, 30, 31, 35, 40, 45, 49, 50, or 53 nucleotides.

[0374] In certain embodiments, the targeting domain comprises, has, or consists of, 20 nucleotides (e.g., 20 consecutive nucleotides) having complementarity with the target domain, e.g., the targeting domain is 20 nucleotides in length; and there are at least 15, 18, 20, 25, 30, 31, 35, 40, 45, 49, 50, or 53 nucleotides 3′ to the last nucleotide of the second complementarity domain.

[0375] In certain embodiments, the targeting domain comprises, has, or consists of, 20 nucleotides (e.g., 20 consecutive nucleotides) having complementarity with the target domain, e.g., the targeting domain is 20 nucleotides in length; and there are at least 16, 19, 21, 26, 31, 32, 36, 41, 46, 50, 51, or 54 nucleotides 3′ to the last nucleotide of the second complementarity domain that is complementary to its corresponding nucleotide of the first complementarity domain.

[0376] In certain embodiments, the targeting domain comprises, has, or consists of, 21 nucleotides (e.g., 21 consecutive nucleotides) having complementarity with the target domain, e.g., the targeting domain is 21 nucleotides in length; and the proximal and tail domain, when taken together, comprise at least 15, 18, 20, 25, 30, 31, 35, 40, 45, 49, 50, or 53 nucleotides.

[0377] In certain embodiments, the targeting domain comprises, has, or consists of, 21 nucleotides (e.g., 21 consecutive nucleotides) having complementarity with the target domain, e.g., the targeting domain is 21 nucleotides in length; and there are at least 15, 18, 20, 25, 30, 31, 35, 40, 45, 49, 50, or 53 nucleotides 3′ to the last nucleotide of the second complementarity domain.

[0378] In certain embodiments, the targeting domain comprises, has, or consists of, 21 nucleotides (e.g., 21 consecutive nucleotides) having complementarity with the target domain, e.g., the targeting domain is 21 nucleotides in length; and there are at least 16, 19, 21, 26, 31, 32, 36, 41, 46, 50, 51, or 54 nucleotides 3′ to the last nucleotide of the second complementarity domain that is complementary to its corresponding nucleotide of the first complementarity domain.

[0379] In certain embodiments, the targeting domain comprises, has, or consists of, 22 nucleotides (e.g., 22 consecutive nucleotides) having complementarity with the target domain, e.g., the targeting domain is 22 nucleotides in length; and the proximal and tail domain, when taken together, comprise at least 15, 18, 20, 25, 30, 31, 35, 40, 45, 49, 50, or 53 nucleotides.

[0380] In certain embodiments, the targeting domain comprises, has, or consists of, 22 nucleotides (e.g., 22 consecutive nucleotides) having complementarity with the target domain, e.g., the targeting domain is 22 nucleotides in length; and there are at least 15, 18, 20, 25, 30, 31, 35, 40, 45, 49, 50, or 53 nucleotides 3′ to the last nucleotide of the second complementarity domain.

[0381] In certain embodiments, the targeting domain comprises, has, or consists of, 22 nucleotides (e.g., 22 consecutive nucleotides) having complementarity with the target domain, e.g., the targeting domain is 22 nucleotides in length; and there are at least 16, 19, 21, 26, 31, 32, 36, 41, 46, 50, 51, or 54 nucleotides 3′ to the last nucleotide of the second complementarity domain that is complementary to its corresponding nucleotide of the first complementarity domain.

[0382] In certain embodiments, the targeting domain comprises, has, or consists of, 23 nucleotides (e.g., 23 consecutive nucleotides) having complementarity with the target domain, e.g., the targeting domain is 23 nucleotides in length; and the proximal and tail domain, when taken together, comprise at least 15, 18, 20, 25, 30, 31, 35, 40, 45, 49, 50, or 53 nucleotides.

[0383] In certain embodiments, the targeting domain comprises, has, or consists of, 23 nucleotides (e.g., 23 consecutive nucleotides) having complementarity with the target domain, e.g., the targeting domain is 23 nucleotides in length; and there are at least 15, 18, 20, 25, 30, 31, 35, 40, 45, 49, 50, or 53 nucleotides 3′ to the last nucleotide of the second complementarity domain.

[0384] In certain embodiments, the targeting domain comprises, has, or consists of, 23 nucleotides (e.g., 23 consecutive nucleotides) having complementarity with the target domain, e.g., the targeting domain is 23 nucleotides in length; and there are at least 16, 19, 21, 26, 31, 32, 36, 41, 46, 50, 51, or 54 nucleotides 3′ to the last nucleotide of the second complementarity domain that is complementary to its corresponding nucleotide of the first complementarity domain.

[0385] In certain embodiments, the targeting domain comprises, has, or consists of, 24 nucleotides (e.g., 24 consecutive nucleotides) having complementarity with the target domain, e.g., the targeting domain is 24 nucleotides in length; and the proximal and tail domain, when taken together, comprise at least 15, 18, 20, 25, 30, 31, 35, 40, 45, 49, 50, or 53 nucleotides.

[0386] In certain embodiments, the targeting domain comprises, has, or consists of, 24 nucleotides (e.g., 24 consecutive nucleotides) having complementarity with the target domain, e.g., the targeting domain is 24 nucleotides in length; and there are at least 15, 18, 20, 25, 30, 31, 35, 40, 45, 49, 50, or 53 nucleotides 3′ to the last nucleotide of the second complementarity domain.

[0387] In certain embodiments, the targeting domain comprises, has, or consists of, 24 nucleotides (e.g., 24 consecutive nucleotides) having complementarity with the target domain, e.g., the targeting domain is 24 nucleotides in length; and there are at least 16, 19, 21, 26, 31, 32, 36, 41, 46, 50, 51, or 54 nucleotides 3′ to the last nucleotide of the second complementarity domain that is complementary to its corresponding nucleotide of the first complementarity domain.

[0388] In certain embodiments, the targeting domain comprises, has, or consists of, 25 nucleotides (e.g., 25 consecutive nucleotides) having complementarity with the target domain, e.g., the targeting domain is 25 nucleotides in length; and the proximal and tail domain, when taken together, comprise at least 15, 18, 20, 25, 30, 31, 35, 40, 45, 49, 50, or 53 nucleotides.

[0389] In certain embodiments, the targeting domain comprises, has, or consists of, 25 nucleotides (e.g., 25 consecutive nucleotides) having complementarity with the target domain, e.g., the targeting domain is 25 nucleotides in length; and there are at least 15, 18, 20, 25, 30, 31, 35, 40, 45, 49, 50, or 53 nucleotides 3′ to the last nucleotide of the second complementarity domain.

[0390] In certain embodiments, the targeting domain comprises, has, or consists of, 25 nucleotides (e.g., 25 consecutive nucleotides) having complementarity with the target domain, e.g., the targeting domain is 25 nucleotides in length; and there are at least 16, 19, 21, 26, 31, 32, 36, 41, 46, 50, 51, or 54 nucleotides 3′ to the last nucleotide of the second complementarity domain that is complementary to its corresponding nucleotide of the first complementarity domain.

[0391] In certain embodiments, the targeting domain comprises, has, or consists of, 26 nucleotides (e.g., 26 consecutive nucleotides) having complementarity with the target domain, e.g., the targeting domain is 26 nucleotides in length; and the proximal and tail domain, when taken together, comprise at least 15, 18, 20, 25, 30, 31, 35, 40, 45, 49, 50, or 53 nucleotides.

[0392] In certain embodiments, the targeting domain comprises, has, or consists of, 26 nucleotides (e.g., 26 consecutive nucleotides) having complementarity with the target domain, e.g., the targeting domain is 26 nucleotides in length; and there are at least 15, 18, 20, 25, 30, 31, 35, 40, 45, 49, 50, or 53 nucleotides 3′ to the last nucleotide of the second complementarity domain.

[0393] In certain embodiments, the targeting domain comprises, has, or consists of, 26 nucleotides (e.g., 26 consecutive nucleotides) having complementarity with the target domain, e.g., the targeting domain is 26 nucleotides in length; and there are at least 16, 19, 21, 26, 31, 32, 36, 41, 46, 50, 51, or 54 nucleotides 3′ to the last nucleotide of the second complementarity domain that is complementary to its corresponding nucleotide of the first complementarity domain.

[0394] gRNA Delivery

[0395] In certain embodiments of the methods provided herein, the methods comprise delivery of one or more (e.g., two, three, or four) gRNA molecules as described herein. In certain of these embodiments, the gRNA molecules are delivered by intravenous injection, intramuscular injection, subcutaneous injection, or inhalation.

II. Methods for Designing gRNA Molecules

[0396] Methods for selecting, designing, and validating targeting domains for use in the gRNAs described herein are provided. Exemplary targeting domains for incorporation into gRNAs are also provided herein.

[0397] Methods for selection and validation of target sequences as well as off-target analyses have been described (see, e.g., Mali 2013; Hsu 2013; Fu 2014; Heigwer 2014; Bae 2014; and Xiao 2014). For example, a software tool can be used to optimize the choice of potential targeting domains corresponding to a user's target sequence, e.g., to minimize total off-target activity across the genome. Off-target activity may be other than cleavage. For each possible targeting domain choice using S. pyogenes Cas9, the tool can identify all off-target sequences (preceding either NAG or NGG PAMs) across the genome that contain up to certain number (e.g., 1, 2, 3, 4, 5, 6, 7, 8, 9, or 10) of mismatched base-pairs. The cleavage efficiency at each off-target sequence can be predicted, e.g., using an experimentally-derived weighting scheme. Each possible targeting domain is then ranked according to its total predicted off-target cleavage; the top-ranked targeting domains represent those that are likely to have the greatest on-target cleavage and the least off-target cleavage. Other functions, e.g., automated reagent design for CRISPR construction, primer design for the on-target Surveyor assay, and primer design for high-throughput detection and quantification of off-target cleavage via next-gen sequencing, can also be included in the tool. Candidate targeting domains and gRNAs comprising those targeting domains can be functionally evaluated by using methods known in the art and/or as set forth herein.

[0398] As a non-limiting example, targeting domains for use in gRNAs for use with S. pyogenes, and S. aureus Cas9s were identified using a DNA sequence searching algorithm. 17-mer and 20-mer targeting domains were designed for S. pyogenes targets, while 18-mer, 19-mer, 20-mer, 21-mer, 22-mer, 23-mer, and 24-mer targeting domains were designed for S. aureus targets. gRNA design was carried out using a custom gRNA design software based on the public tool cas-offinder (Bae 2014). This software scores guides after calculating their genome-wide off-target propensity. Typically matches ranging from perfect matches to 7 mismatches are considered for guides ranging in length from 17 to 24. Once the off-target sites are computationally-determined, an aggregate score is calculated for each guide and summarized in a tabular output using a web-interface. In addition to identifying potential target sites adjacent to PAM sequences, the software also identifies all PAM adjacent sequences that differ by 1, 2, 3 or more than 3 nucleotides from the selected target sites. Genomic DNA sequences for a HBB gene was obtained from the UCSC Genome browser and sequences were screened for repeat elements using the publically available RepeatMasker program. RepeatMasker searches input DNA sequences for repeated elements and regions of low complexity. The output is a detailed annotation of the repeats present in a given query sequence.

[0399] Following identification, targeting domains were ranked into tiers based on their distance to the target site, their orthogonality and presence of a 5′ G (based on identification of close matches in the human genome containing a relevant PAM e.g., NGG PAM for S. pyogenes, NNGRRT or NNGRRV PAM for S. aureus. Orthogonality refers to the number of sequences in the human genome that contain a minimum number of mismatches to the target sequence. A “high level of orthogonality” or “good orthogonality” may, for example, refer to 20-mer targeting domains that have no identical sequences in the human genome besides the intended target, nor any sequences that contain one or two mismatches in the target sequence. Targeting domains with good orthogonality are selected to minimize off-target DNA cleavage.

[0400] Targeting domains were identified for both single-gRNA nuclease cleavage and for a dual-gRNA paired “nickase” strategy. Criteria for selecting targeting domains and the determination of which targeting domains can be incorporated into a gRNA and used for the dual-gRNA paired “nickase” strategy is based on two considerations:
[0401] 1. gRNA pairs should be oriented on the DNA such that PAMs are facing out and cutting with the D10A Cas9 nickase will result in 5′ overhangs.
[0402] 2. An assumption that cleaving with dual nickase pairs will result in deletion of the entire intervening sequence at a reasonable frequency. However, cleaving with dual nickase pairs can also result in indel mutations at the site of only one of the gRNA molecules. Candidate pair members can be tested for how efficiently they remove the entire sequence versus causing indel mutations at the target site of one gRNA molecule.

[0403] Targeting Domains for Use in Correcting the E6V Mutation in the HBB Gene

[0404] Targeting domains to target the E6V mutation in the HBB gene in conjunction with the methods disclosed herein were identified and ranked into tiers for S. pyogenes, S. aureus and N. meningitidis.

[0405] A. First Targeting Domain Selection Strategy

[0406] For S. pyogenes Cas9, targeting domains were identified and ranked into three tiers. Tier 1 targeting domains were selected based on (1) a reasonable distance upstream or downstream from either end of the target site, and (2) a high level of orthogonality. Tier 2 targeting domains were selected based on (1) a reasonable distance upstream or downstream from either end of the target site, and (2) presence of a 5′G. Tier 3 targeting domains were selected based on (1) a reasonable upstream or downstream from either end of the target site.

[0407] For S. aureus Cas9, targeting domains were identified manually by scanning genomic DNA sequence for the presence of PAM sequences. These gRNAs were not separated into tiers.

[0408] Note that tiers are non-inclusive (each targeting domain is listed only once for the strategy). The identified targeting domains are summarized below in Table 1.

TABLE 1
Nucleic Acid Sequences of S. pyogenes and S. aureus targeting domains

| Tier | S. pyogenes | S. aureus* |
|---|---|---|
| Tier 1 | SEQ ID NOs: 387-390 | SEQ ID NOs: 442-485 |
| Tier 2 | SEQ ID NOs: 391-404 | |
| Tier 3 | SEQ ID NOs: 405-441 | |

*Not separated into tiers.

[0409] In certain embodiments, a point mutation in the HBB gene, e.g., at E6, e.g., E6V, is targeted, e.g., for correction by gene conversion. In certain embodiments, the targeting domain of a gRNA molecule comprises a sequence that is the same as, or differs by no more than 1, 2, 3, 4, or 5 nucleotides from, a targeting domain sequence from any one of Table 1. In certain embodiments, the targeting domain is selected from those in Tables 1. For example, in certain embodiments, the targeting domain is:

(SEQ ID NO: 387)
AAGGUGAACGUGGAUGAAGU;
(SEQ ID NO: 388)
GUAACGGCAGACUUCUCCUC;
(SEQ ID NO: 389)
GUGAACGUGGAUGAAGU;
(SEQ ID NO: 390)
ACGGCAGACUUCUCCUC;
or
(SEQ ID NO: 16318)
GUAACGGCAGACUUCUCCAC.

[0410] In certain embodiments, when the SCD target point position is E6, e.g., E6V, and two gRNAs are used to position two breaks, e.g., two single stranded breaks, in the target nucleic acid sequence, the targeting domain of each gRNA molecule is selected from one of Table 1.

[0411] B. Second Targeting Domain Selection Strategy

[0412] For S. pyogenes Cas9, targeting domains were identified and ranked into four tiers. Tier 1 targeting domains were selected based on (1) a short distance upstream or downstream from either end of the target site, e.g., within 100 bp upstream and 100 bp downstream of the E6V mutation, (2) a high level of orthogonality, and (3) the presence of a 5′ G. Tier 2 targeting domains were selected based on (1) a short distance upstream or downstream from either end of the target site, e.g., within 100 bp upstream and 100 bp downstream of the E6V mutation, and (2) a high level of orthogonality. Tier 3 targeting domains were selected based on (1) a short distance upstream or downstream from either end of the target site, e.g., within 100 bp upstream and 100 bp downstream of the E6V mutation, (2) the presence of a 5′ G. Tier 4 targeting domains were selected based on (1) a short distance upstream or downstream from either end of the target site, e.g., within 100 bp upstream and 100 bp downstream of the E6V mutation.

[0413] For S. aureus Cas9, targeting domains were identified and ranked into 5 tiers. Tier 1 targeting domains were selected based on (1) a short distance upstream or downstream from either end of the target site, e.g., within 100 bp upstream and 100 bp downstream of the E6V mutation, (2) a high level of orthogonality, and (3) the presence of a 5′ G. Tier 2 targeting domains were selected based on (1) a short distance upstream or downstream from either end of the target site, e.g., within 100 bp upstream and 100 bp downstream of the E6V mutation, and (2) a high level of orthogonality. Tier 3 targeting domains were selected based on (1) a short distance upstream or downstream from either end of the target site, e.g., within 100 bp upstream and 100 bp downstream of the E6V mutation, and (2) the presence of a 5′ G. Tier 4 targeting domains were selected based on (1) a short distance upstream or downstream from either end of the target site, e.g., within 100 bp upstream and 100 bp downstream of the E6V mutation. Tier 5 targeting domains were selected based on (1) a short distance upstream or downstream from either end of the target site, e.g., within 100 bp upstream and 100 bp downstream of the E6V mutation, and (2) the PAM is NNGRRV.

[0414] Note that tiers are non-inclusive (each targeting domain is listed only once for the strategy). In certain instances, no targeting domain was identified based on the criteria of the particular tier. The identified targeting domains are summarized below in Table 2.

TABLE 2
Nucleic Acid Sequences of S. pyogenes and S. aureus targeting domains

| Tier | S. pyogenes | S. aureus |
|---|---|---|
| Tier 1 | SEQ ID NOs: 6803-6804 | SEQ ID NO: 6855 |
| Tier 2 | SEQ ID NOs: 6805-6810 | SEQ ID NO: 6856 |
| Tier 3 | SEQ ID NOs: 6811-6822 | N/A |
| Tier 4 | SEQ ID NOs: 6823-6854 | N/A |
| Tier 5 | N/A | SEQ ID NOs: 6857-6871 |

[0415] Exemplary gRNA pairs can be generated using the following targeting domain pairs: HBB-9 (SEQ ID NO: 6811) and HBB-11 (SEQ ID NO: 6813); HBB-9 (SEQ ID NO: 6811) and HBB-39 (SEQ ID NO: 6841); HBB-20 (SEQ ID NO: 6822) and HBB-11 (SEQ ID NO: 6813); and HBB-20 (SEQ ID NO: 6822) and HBB-39 (SEQ ID NO: 6841).

[0416] In certain embodiments, a point mutation in the HBB gene, e.g., at E6, e.g., E6V, is targeted, e.g., for correction. In certain embodiments, the targeting domain of a gRNA molecule comprises a sequence that is the same as, or differs by no more than 1, 2, 3, 4, or 5 nucleotides from, a targeting domain sequence from any one of Table 2. In certain embodiments, the targeting domain is selected from those in Tables 2. For example, in certain embodiments, the targeting domain is:

(SEQ ID NO: 6803)
GGUGCACCUGACUCCUG;
or
(SEQ ID NO: 6804)
GUAACGGCAGACUUCUCCAC.

[0417] In certain embodiments, when the SCD target point position is E6, e.g., E6V, and two gRNAs are used to position two breaks, e.g., two single stranded breaks, in the target nucleic acid sequence, the targeting domain of each gRNA molecule is selected from one of Table 2.

[0418] C. Third Targeting Domain Selection Strategy

[0419] For S. pyogenes Cas9, targeting domains were identified and ranked into 3 tiers. Tier 1 targeting domains were selected based on (1) distance upstream or downstream from either end of the target site, e.g., within 200 bp upstream and 200 bp downstream of the E6V mutation and (2) a high level of orthogonality. Tier 2 targeting domains were selected based on (1) distance upstream or downstream from either end of the target site, e.g., within 200 bp upstream and 200 bp downstream of the E6V mutation, and (2) the presence of a 5′ G. Tier 3 targeting domains were selected based on (1) distance upstream or downstream from either end of the target site, e.g., within 200 bp upstream and 200 bp downstream of the E6V mutation. For S. aureus Cas9, targeting domains were identified and ranked into 4 tiers. Tier 1 targeting domains were selected based on (1) distance upstream or downstream from either end of the target site, e.g., within 200 bp upstream and 200 bp downstream of the E6V mutation, (2) a high level of orthogonality, and (3) the PAM is NNGRRT. Tier 2 targeting domains were selected based on (1) distance upstream or downstream from either end of the target site, e.g., within 200 bp upstream and 200 bp downstream of the E6V mutation, (2) the presence of a 5′ G, and (3) the PAM is NNGRRT. Tier 3 targeting domains were selected based on (1) distance upstream or downstream from either end of the target site, e.g., within 200 bp upstream and 200 bp downstream of the E6V mutation and (2) the PAM is NNGRRT. Tier 4 targeting domains were selected based on (1) distance upstream or downstream from either end of the target site, e.g., within 200 bp upstream and 200 bp downstream of the E6V mutation and (2) the PAM is NNGRRT.

[0420] For N. meningitidis Cas9, targeting domains were identified and ranked into 3 tiers. Tier 1 targeting domains were selected based on (1) distance upstream or downstream from either end of the target site, e.g., within 200 bp upstream and 200 bp downstream of the E6V mutation and (2) a high level of orthogonality. Tier 2 targeting domains were selected based on (1) distance upstream or downstream from either end of the target site, e.g., within 200 bp upstream and 200 bp downstream of the E6V mutation, and (2) the presence of a 5′ G. Tier 3 targeting domains were selected based on (1) distance upstream or downstream from either end of the target site, e.g., within 200 bp upstream and 200 bp downstream of the E6V mutation.

[0421] Note that tiers are non-inclusive (each targeting domain is listed only once for the strategy). In certain instances, no targeting domain was identified based on the criteria of the particular tier. The identified targeting domains are summarized below in Table 3.

TABLE 3
Nucleic Acid Sequences of S. pyogenes and S. aureus targeting domains

| Tier | S. pyogenes | S. aureus | N. meningitidis |
|---|---|---|---|
| Tier 1 | SEQ ID NOs: 16010-16055 | SEQ ID NOs: 16085-16098 | SEQ ID NOs: 16253-16256 |
| Tier 2 | SEQ ID NOs: 16056-16063 | N/A | |
| Tier 3 | SEQ ID NOs: 16064-16084 | N/A | |
| Tier 4 | N/A | SEQ ID NOs: 16099-16252 | |

[0422] In certain embodiments, a point mutation in the HBB gene, e.g., at E6, e.g., E6V, is targeted, e.g., for correction. In certain embodiments, the targeting domain of a gRNA molecule comprises a sequence that is the same as, or differs by no more than 1, 2, 3, 4, or 5 nucleotides from, a targeting domain sequence from any one of Table 3. In certain embodiments, the targeting domain is selected from those in Table 3.

[0423] In certain embodiments, when the SCD target point position is E6, e.g., E6V, and two gRNA molecules are used to position two breaks, e.g., two single stranded breaks, in the target nucleic acid sequence, the target domain of each gRNA is selected from one of Table 3.

[0424] Other gRNA Design Strategy

[0425] In certain embodiments, two or more (e.g., three or four) gRNA molecules are used with one Cas9 molecule. In another embodiment, when two or more (e.g., three or four) gRNAs are used with two or more Cas9 molecules, at least one Cas9 molecule is from a different species than the other Cas9 molecule(s). For example, when two gRNA molecules are used with two Cas9 molecules, one Cas9 molecule can be from one species and the other Cas9 molecule can be from a different species. Both Cas9 species are used to generate a single or double-strand break, as desired.

[0426] In certain embodiments, dual targeting is used to create two nicks on opposite DNA strands by using Cas9 nickases (e.g., a S. pyogenes Cas9 nickase) with two targeting domains that are complementary to opposite DNA strands, e.g., a gRNA molecule comprising any minus strand targeting domain may be paired any gRNA molecule comprising a plus strand targeting domain provided that the two gRNAs are oriented on the DNA such that PAMs face outward and the distance between the 5′ ends of the gRNAs is 0-50 bp. When selecting gRNA molecules for use in a nickase pair, one gRNA molecule targets a domain in the complementary strand and the second gRNA molecule targets a domain in the non-complementary strand, e.g., a gRNA comprising any minus strand targeting domain may be paired any gRNA molecule comprising a plus strand targeting domain targeting the same target position. In certain embodiments, two 20-mer gRNAs are used to target two Cas9 nucleases (e.g., two S. pyogenes Cas9 nucleases) or two Cas9 nickases (e.g., two S. pyogenes Cas9 nickases), e.g., two gRNAs comprising the targeting domains of HBB-8 (SEQ ID NO: 388) and HBB-15 (SEQ ID NO: 387) are used. In certain embodiments, two 17-mer gRNAs are used to target two Cas9 nucleases or two Cas9 nickases, e.g., two gRNAs comprising the targeting domains of HBB-35 (SEQ ID NO: 389) and HBB-53 (SEQ ID NO: 390) are used. Any of the targeting domains in the tables described herein can be used with a Cas9 molecule that generates a single-strand break (i.e., a S. pyogenes or S. aureus Cas9 nickase) or with a Cas9 molecule that generates a double-strand break (i.e., S. pyogenes or S. aureus Cas9 nuclease).

[0427] In certain embodiments, the targeting domain comprises a sequence that is the same as, or differs by no more than 1, 2, 3, 4, or 5 nucleotides from, a targeting domain sequence described herein, e.g., a targeting domain sequence selected from any one of Tables 1-3. In certain embodiments, the targeting domain is a targeting domain sequence described herein, e.g., a targeting domain sequence selected from those in Tables 1-3.

[0428] HBB gRNA molecules, as described herein, may comprise from 5′ to 3′: a targeting domain (comprising a “core domain”, and optionally a “secondary domain”); a first complementarity domain; a linking domain; a second complementarity domain; a proximal domain; and a tail domain. In an embodiment, the proximal domain and tail domain are taken together as a single domain.

[0429] In an embodiment, a gRNA molecule comprises a linking domain of no more than 25 nucleotides in length; a proximal and tail domain, that taken together, are at least 20 nucleotides in length; and a targeting domain equal to or greater than 16, 17, 18, 19, 20, 21, 22, 23, 24, 25 or 26 nucleotides in length.

[0430] In another embodiment, a gRNA molecule comprises a linking domain of no more than 25 nucleotides in length; a proximal and tail domain, that taken together, are at least 25 nucleotides in length; and a targeting domain equal to or greater than 16, 17, 18, 19, 20, 21, 22, 23, 24, 25 or 26 nucleotides in length.

[0431] In another embodiment, a gRNA molecule comprises a linking domain of no more than 25 nucleotides in length; a proximal and tail domain, that taken together, are at least 30 nucleotides in length; and a targeting domain equal to or greater than 16, 17, 18, 19, 20, 21, 22, 23, 24, 25 or 26 nucleotides in length.

[0432] In another embodiment, a gRNA molecule comprises a linking domain of no more than 25 nucleotides in length; a proximal and tail domain, that taken together, are at least 40 nucleotides in length; and a targeting domain equal to or greater than 16, 17, 18, 19, 20, 21, 22, 23, 24, 25 or 26 nucleotides in length.

[0433] When two gRNAs are designed for use with two Cas9 molecules, the two Cas9 molecules may be from different species. Both Cas9 species may be used to generate a single or double strand break, as desired.

[0434] It is contemplated herein that any upstream gRNA described herein may be paired with any downstream gRNA described herein. When an upstream gRNA designed for use with one species of Cas9 molecule is paired with a downstream gRNA designed for use from a different species of Cas9 molecule, both Cas9 species are used to generate a single or double-strand break, as desired.

### III. Cas9 Molecules

[0435] Cas9 molecules of a variety of species can be used in the methods and compositions described herein. While S. pyogenes and S. aureus Cas9 molecules are the subject of much of the disclosure herein, Cas9 molecules of, derived from, or based on the Cas9 proteins of other species listed herein can be used as well. These include, for example, Cas9 molecules from Acidovorax avenae, Actinobacillus pleuropneumoniae, Actinobacillus succinogenes, Actinobacillus suis, Actinomyces sp., Cycliphilus denitrificans, Aminomonas paucivorans, Bacillus cereus, Bacillus smithii, Bacillus thuringiensis, Bacteroides sp., Blastopirellula marina, Bradyrhizobium sp., Brevibacillus laterosporus, Campylobacter coli, Campylobacter jejuni, Campylobacter lari, Candidatus puniceispirillum, Clostridium cellulolyticum, Clostridium perfringens, Corynebacterium accolens, Corynebacterium diphtheria, Corynebacterium matruchotii, Dinoroseobacter shibae, Eubacterium dolichum, gamma proteobacterium, Gluconacetobacter diazotrophicus, Haemophilus parainfluenzae, Haemophilus sputorum, Helicobacter canadensis, Helicobacter cinaedi, Helicobacter mustelae, Ilyobacter polytropus, Kingella kingae, Lactobacillus crispatus, Listeria ivanovii, Listeria monocytogenes, Listeriaceae bacterium, Methylocystis sp., Methylosinus trichosporium, Mobiluncus mulieris, Neisseria bacilliformis, Neisseria cinerea, Neisseria flavescens, Neisseria lactamica, Neisseria meningitidis, Neisseria sp., Neisseria wadsworthii, Nitrosomonas sp., Parvibaculum lavamentivorans, Pasteurella multocida, Phascolarctobacterium succinatutens, Ralstonia syzygii, Rhodopseudomonas palustris, Rhodovulum sp., Simonsiella muelleri, Sphingomonas sp., Sporolactobacillus vineae, Staphylococcus lugdunensis, Streptococcus sp., Subdoligranulum sp., Tistrella mobilis, Treponema sp., or Verminephrobacter eiseniae. The amino acid sequences of exemplary Cas9 orthologs are set forth in SEQ ID NOs: 304-386.

[0436] Cas9 Domains

[0437] Crystal structures have been determined for two different naturally occurring bacterial Cas9 molecules (Jinek et al. 2014) and for S. pyogenes Cas9 with a guide RNA (e.g., a synthetic fusion of crRNA and tracrRNA) (Nishimasu et al. 2014; and Anders 2014).

[0438] A naturally-occurring Cas9 molecule comprises two lobes: a recognition (REC) lobe and a nuclease (NUC) lobe; each of which further comprise domains described herein. The domain nomenclature and the numbering of the amino acid residues encompassed by each domain used throughout this disclosure is as described previously in (Nishimasu 2014). The numbering of the amino acid residues is with reference to Cas9 from S. pyogenes.

[0439] The REC lobe comprises the arginine-rich bridge helix (BH), the REC1 domain, and the REC2 domain. The REC lobe does not share structural similarity with other known proteins, indicating that it is a Cas9-specific functional domain. The BH domain is a long a helix and arginine rich region and comprises amino acids 60-93 of the sequence of S. pyogenes Cas9. The REC1 domain is important for recognition of the repeat:anti-repeat duplex, e.g., of a gRNA or a tracrRNA, and is therefore critical for Cas9 activity by recognizing the target sequence. The REC1 domain comprises two REC1 motifs at amino acids 94 to 179 and 308 to 717 of the sequence of S. pyogenes Cas9. These two REC1 domains, though separated by the REC2 domain in the linear primary structure, assemble in the tertiary structure to form the REC1 domain. The REC2 domain, or parts thereof, may also play a role in the recognition of the repeat:anti-repeat duplex. The REC2 domain comprises amino acids 180-307 of the sequence of S. pyogenes Cas9.

[0440] The NUC lobe comprises the RuvC domain, the HNH domain, and the PAM-interacting (PI) domain. The RuvC domain shares structural similarity to retroviral integrase superfamily members and cleaves a single strand, e.g., the non-complementary strand of the target nucleic acid molecule. The RuvC domain is assembled from the three split RuvC motifs (RuvC I, RuvCII, and RuvCIII, which are often commonly referred to in the art as RuvCI domain, or N-terminal RuvC domain, RuvCII domain, and RuvCIII domain) at amino acids 1-59, 718-769, and 909-1098, respectively, of the sequence of S. pyogenes Cas9. Similar to the REC1 domain, the three RuvC motifs are linearly separated by other domains in the primary structure, however in the tertiary structure, the three RuvC motifs assemble and form the RuvC domain. The HNH domain shares structural similarity with HNH endonucleases, and cleaves a single strand, e.g., the complementary strand of the target nucleic acid molecule. The HNH domain lies between the RuvC II-III motifs and comprises amino acids 775-908 of the sequence of S. pyogenes Cas9. The PI domain interacts with the PAM of the target nucleic acid molecule, and comprises amino acids 1099-1368 of the sequence of S. pyogenes Cas9.

[0441] RuvC-Like Domain and an HNH-Like Domain

[0442] In certain embodiments, a Cas9 molecule or Cas9 polypeptide comprises an HNH-like domain and a RuvC-like domain and in certain of these embodiments cleavage activity is dependent on the RuvC-like domain and the HNH-like domain. A Cas9 molecule or Cas9 polypeptide can comprise one or more of a RuvC-like domain and an HNH-like domain. In certain embodiments, a Cas9 molecule or Cas9 polypeptide comprises a RuvC-like domain, e.g., a RuvC-like domain described below, and/or an HNH-like domain, e.g., an HNH-like domain described below.

[0443] RuvC-Like Domains

[0444] In certain embodiments, a RuvC-like domain cleaves, a single strand, e.g., the non-complementary strand of the target nucleic acid molecule. The Cas9 molecule or Cas9 polypeptide can include more than one RuvC-like domain (e.g., one, two, three or more RuvC-like domains). In certain embodiments, a RuvC-like domain is at least 5, 6, 7, 8 amino acids in length but not more than 20, 19, 18, 17, 16 or 15 amino acids in length. In certain embodiments, the Cas9 molecule or Cas9 polypeptide comprises an N-terminal RuvC-like domain of about 10 to 20 amino acids, e.g., about 15 amino acids in length.

[0445] N-Terminal RuvC-Like Domains

[0446] Some naturally occurring Cas9 molecules comprise more than one RuvC-like domain with cleavage being dependent on the N-terminal RuvC-like domain. Accordingly, a Cas9 molecule or Cas9 polypeptide can comprise an N-terminal RuvC-like domain. Exemplary N-terminal RuvC-like domains are described below.

[0447] In certain embodiments, a Cas9 molecule or Cas9 polypeptide comprises an N-terminal RuvC-like domain comprising an amino acid sequence of Formula I:

(SEQ ID NO: 8)
D-X₁-G-X₂-X₃-X₄-X₅-G-X₆-X₇-X₈-X₉,

wherein,

[0448] X₁ is selected from I, V, M, L and T (e.g., selected from I, V, and L);

[0449] X₂ is selected from T, I, V, S, N, Y, E and L (e.g., selected from T, V, and I);

[0450] X₃ is selected from N, S, G, A, D, T, R, M and F (e.g., A or N);

[0451] X₄ is selected from S, Y, N and F (e.g., S);

[0452] X₅ is selected from V, I, L, C, T and F (e.g., selected from V, I and L);

[0453] X₆ is selected from W, F, V, Y, S and L (e.g., W);

[0454] X₇ is selected from A, S, C, V and G (e.g., selected from A and S);

[0455] X₈ is selected from V, I, L, A, M and H (e.g., selected from V, I, M and L); and

[0456] X₉ is selected from any amino acid or is absent (e.g., selected from T, V, I, L, A, F, S, A, Y, M and R, or, e.g., selected from T, V, I, L and A).

[0457] In certain embodiments, the N-terminal RuvC-like domain differs from a sequence of SEQ ID NO:8, by as many as 1 but no more than 2, 3, 4, or 5 residues.

[0458] In certain embodiments, the N-terminal RuvC-like domain is cleavage competent.

[0459] In other embodiments, the N-terminal RuvC-like domain is cleavage incompetent.

[0460] In certain embodiments, a Cas9 molecule or Cas9 polypeptide comprises an N-terminal RuvC-like domain comprising an amino acid sequence of Formula II:

(SEQ ID NO: 9)
D-X₁-G-X₂-X₃-S-X₅-G-X₆-X₇-X₈-X₉,,

wherein

[0461] X₁ is selected from I, V, M, L and T (e.g., selected from I, V, and L);

[0462] X₂ is selected from T, I, V, S, N, Y, E and L (e.g., selected from T, V, and I);

[0463] X₃ is selected from N, S, G, A, D, T, R, M and F (e.g., A or N);

[0464] X₅ is selected from V, I, L, C, T and F (e.g., selected from V, I and L);

[0465] X₆ is selected from W, F, V, Y, S and L (e.g., W);

[0466] X₇ is selected from A, S, C, V and G (e.g., selected from A and S);

[0467] X₈ is selected from V, I, L, A, M and H (e.g., selected from V, I, M and L); and

[0468] X₉ is selected from any amino acid or is absent (e.g., selected from T, V, I, L, A, F, S, A, Y, M and R or selected from e.g., T, V, I, L and A).

[0469] In certain embodiments, the N-terminal RuvC-like domain differs from a sequence of SEQ ID NO:9 by as many as 1 but not more than 2, 3, 4, or 5 residues.

[0470] In certain embodiments, the N-terminal RuvC-like domain comprises an amino acid sequence of Formula III:

(SEQ ID NO: 10)
D-I-G-X₂-X₃-S-V-G-W-A-X₈-X₉,

wherein

[0471] X₂ is selected from T, I, V, S, N, Y, E and L (e.g., selected from T, V, and I);

[0472] X₃ is selected from N, S, G, A, D, T, R, M and F (e.g., A or N);

[0473] X₈ is selected from V, I, L, A, M and H (e.g., selected from V, I, M and L); and

[0474] X₉ is selected from any amino acid or is absent (e.g., selected from T, V, I, L, A, F, S, A, Y, M and R or selected from e.g., T, V, I, L and A).

[0475] In certain embodiments, the N-terminal RuvC-like domain differs from a sequence of SEQ ID NO:10 by as many as 1 but not more than, 2, 3, 4, or 5 residues.

[0476] In certain embodiments, the N-terminal RuvC-like domain comprises an amino acid sequence of Formula IV:

(SEQ ID NO: 11)
D-I-G-T-N-S-V-G-W-A-V-X,

wherein

[0477] X is a non-polar alkyl amino acid or a hydroxyl amino acid, e.g., X is selected from V, I, L and T.

[0478] In certain embodiments, the N-terminal RuvC-like domain differs from a sequence of SEQ ID NO:11 by as many as 1 but not more than, 2, 3, 4, or 5 residues.

[0479] In certain embodiments, the N-terminal RuvC-like domain differs from a sequence of an N-terminal RuvC like domain disclosed herein, e.g., in any one of SEQ ID Nos: 54-103, as many as 1 but no more than 2, 3, 4, or 5 residues. In certain embodiments, 1, 2, 3 or all of the highly conserved residues of SEQ ID Nos: 54-103 are present.

[0480] In certain embodiment, the N-terminal RuvC-like domain differs from a sequence of an N-terminal RuvC-like domain disclosed herein, e.g., in any one of SEQ ID Nos: 104-177, as many as 1 but no more than 2, 3, 4, or 5 residues. In certain embodiments, 1, 2, or all of the highly conserved residues identified of SEQ ID Nos: 104-177 are present.

[0481] Additional RuvC-Like Domains

[0482] In addition to the N-terminal RuvC-like domain, the Cas9 molecule or Cas9 polypeptide can comprise one or more additional RuvC-like domains. In certain embodiments, the Cas9 molecule or Cas9 polypeptide can comprise two additional RuvC-like domains. Preferably, the additional RuvC-like domain is at least 5 amino acids in length and, e.g., less than 15 amino acids in length, e.g., 5 to 10 amino acids in length, e.g., 8 amino acids in length.

[0483] An additional RuvC-like domain can comprise an amino acid sequence of Formula V:

(SEQ ID NO: 12)
I-X₁-X₂-E-X₃-A-R-E,

wherein

[0484] X₁ is V or H;

[0485] X₂ is I, L or V (e.g., I or V); and

[0486] X₃ is M or T.

[0487] In certain embodiments, the additional RuvC-like domain comprises an amino acid sequence of Formula VI:

(SEQ ID NO: 13)
I-V-X₂-E-M-A-R-E,

wherein

[0488] X₂ is I, L or V (e.g., I or V).

[0489] An additional RuvC-like domain can comprise an amino acid sequence of Formula VII:

(SEQ ID NO: 14)
H-H-A-X1-D-A-X₂-X₃,

wherein

[0490] X₁ is H or L;

[0491] X₂ is R or V; and

[0492] X₃ is E or V.

[0493] In certain embodiments, the additional RuvC-like domain comprises the amino acid sequence:

(SEQ ID NO: 15)
H-H-A-H-D-A-Y-L.

[0494] In certain embodiments, the additional RuvC-like domain differs from a sequence of SEQ ID NOs: 12-15 by as many as 1 but not more than 2, 3, 4, or 5 residues.

[0495] In certain embodiment, the sequence flanking the N-terminal RuvC-like domain has the amino acid sequence of Formula VIII:

(SEQ ID NO: 16)
K-X₁′-Y-X₂′-X₃′-X₄′-Z-T-D-X₉′-Y,.

wherein

[0496] X₁′ is selected from K and P;

[0497] X₂′ is selected from V, L, I, and F (e.g., V, I and L);

[0498] X₃′ is selected from G, A and S (e.g., G);

[0499] X₄′ is selected from L, I, V and F (e.g., L);

[0500] X₉′ is selected from D, E, N and Q; and

[0501] Z is an N-terminal RuvC-like domain, e.g., as described above, e.g., having 5 to 20 amino acids.

[0502] HNH-Like Domains

[0503] In certain embodiments, an HNH-like domain cleaves a single stranded complementary domain, e.g., a complementary strand of a double stranded nucleic acid molecule. In certain embodiments, an HNH-like domain is at least 15, 20, or 25 amino acids in length but not more than 40, 35, or 30 amino acids in length, e.g., 20 to 35 amino acids in length, e.g., 25 to 30 amino acids in length. Exemplary HNH-like domains are described below.

[0504] In certain embodiments, a Cas9 molecule or Cas9 polypeptide comprises an HNH-like domain having an amino acid sequence of Formula IX:

(SEQ ID NO: 17)
X₁-X₂-X₃-H-X₄-X₅-P-X₆-X₇-X₈-X₉-X1₀-X₁₁-X₁₂-X₁₃-X₁₄-X₁₅-
N-X₁₆-X₁₇-X₁₈-X₁₉-X₂₀-X₂₁-X₂₂-X₂₃-N,

wherein

[0505] X₁ is selected from D, E, Q and N (e.g., D and E);

[0506] X₂ is selected from L, I, R, Q, V, M and K;

[0507] X₃ is selected from D and E;

[0508] X₄ is selected from I, V, T, A and L (e.g., A, I and V);

[0509] X₅ is selected from V, Y, I, L, F and W (e.g., V, I and L);

[0510] X₆ is selected from Q, H, R, K, Y, I, L, F and W;

[0511] X₇ is selected from S, A, D, T and K (e.g., S and A);

[0512] X₈ is selected from F, L, V, K, Y, M, I, R, A, E, D and Q (e.g., F);

[0513] X₉ is selected from L, R, T, I, V, S, C, Y, K, F and G;

[0514] X₁₀ is selected from K, Q, Y, T, F, L, W, M, A, E, G, and S;

[0515] X₁₁ is selected from D, S, N, R, L and T (e.g., D);

[0516] X₁₂ is selected from D, N and S;

[0517] X₁₃ is selected from S, A, T, G and R (e.g., S);

[0518] X₁₄ is selected from I, L, F, S, R, Y, Q, W, D, K and H (e.g., I, L and F);

[0519] X₁₅ is selected from D, S, I, N, E, A, H, F, L, Q, M, G, Y and V;

[0520] X₁₆ is selected from K, L, R, M, T and F (e.g., L, R and K);

[0521] X₁₇ is selected from V, L, I, A and T;

[0522] X₁₈ is selected from L, I, V and A (e.g., L and I);

[0523] X₁₉ is selected from T, V, C, E, S and A (e.g., T and V);

[0524] X₂₀ is selected from R, F, T, W, E, L, N, C, K, V, S, Q, I, Y, H and A;

[0525] X₂₁ is selected from S, P, R, K, N, A, H, Q, G and L;

[0526] X₂₂ is selected from D, G, T, N, S, K, A, I, E, L, Q, R and Y; and

[0527] X₂₃ is selected from K, V, A, E, Y, I, C, L, S, T, G, K, M, D and F.

[0528] In certain embodiments, a HNH-like domain differs from a sequence of SEQ ID NO: 17 by at least one but not more than, 2, 3, 4, or 5 residues.

[0529] In certain embodiments, the HNH-like domain is cleavage competent.

[0530] In other embodiments, the HNH-like domain is cleavage incompetent.

[0531] In certain embodiments, a Cas9 molecule or Cas9 polypeptide comprises an HNH-like domain comprising an amino acid sequence of Formula X:

(SEQ ID NO: 18)
X₁-X₂-X₃-H-X₄-X₅-P-X₆-S-X₈-X₉-X₁₀-D-D-S-X₁₄-X₁₅-N-K-
V-L-X₁₉-X₂₀-X₂₁-X₂₂-X₂₃-N,

wherein

[0532] X₁ is selected from D and E;

[0533] X₂ is selected from L, I, R, Q, V, M and K;

[0534] X₃ is selected from D and E;

[0535] X₄ is selected from I, V, T, A and L (e.g., A, I and V);

[0536] X₅ is selected from V, Y, I, L, F and W (e.g., V, I and L);

[0537] X₆ is selected from Q, H, R, K, Y, I, L, F and W;

[0538] X₈ is selected from F, L, V, K, Y, M, I, R, A, E, D and Q (e.g., F);

[0539] X₉ is selected from L, R, T, I, V, S, C, Y, K, F and G;

[0540] X₁₀ is selected from K, Q, Y, T, F, L, W, M, A, E, G, and S;

[0541] X₁₄ is selected from I, L, F, S, R, Y, Q, W, D, K and H (e.g., I, L and F);

[0542] X₁₅ is selected from D, S, I, N, E, A, H, F, L, Q, M, G, Y and V;

[0543] X₁₉ is selected from T, V, C, E, S and A (e.g., T and V);

[0544] X₂₀ is selected from R, F, T, W, E, L, N, C, K, V, S, Q, I, Y, H and A;

[0545] X₂₁ is selected from S, P, R, K, N, A, H, Q, G and L;

[0546] X₂₂ is selected from D, G, T, N, S, K, A, I, E, L, Q, R and Y; and

[0547] X₂₃ is selected from K, V, A, E, Y, I, C, L, S, T, G, K, M, D and F.

[0548] In certain embodiments, the HNH-like domain differs from a sequence of SEQ ID NO: 18 by 1, 2, 3, 4, or 5 residues.

[0549] In certain embodiments, a Cas9 molecule or Cas9 polypeptide comprises an HNH-like domain comprising an amino acid sequence of Formula XI:

(SEQ ID NO: 19)
X₁-V-X₃-H-I-V-P-X₆-S-X₈-X₉-X₁₀-D-D-S-X₁₄-X₁₅-N-K-V-L-
T-X₂₀-X₂₁-X₂₂-X₂₃-N,

wherein

[0550] X₁ is selected from D and E;

[0551] X₃ is selected from D and E;

[0552] X₆ is selected from Q, H, R, K, Y, I, L and W;

[0553] X₈ is selected from F, L, V, K, Y, M, I, R, A, E, D and Q (e.g., F);

[0554] X₉ is selected from L, R, T, I, V, S, C, Y, K, F and G;

[0555] X₁₀ is selected from K, Q, Y, T, F, L, W, M, A, E, G, and S;

[0556] X₁₄ is selected from I, L, F, S, R, Y, Q, W, D, K and H (e.g., I, L and F);

[0557] X₁₅ is selected from D, S, I, N, E, A, H, F, L, Q, M, G, Y and V;

[0558] X₂₀ is selected from R, F, T, W, E, L, N, C, K, V, S, Q, I, Y, H and A;

[0559] X₂₁ is selected from S, P, R, K, N, A, H, Q, G and L;

[0560] X₂₂ is selected from D, G, T, N, S, K, A, I, E, L, Q, R and Y; and

[0561] X₂₃ is selected from K, V, A, E, Y, I, C, L, S, T, G, K, M, D and F.

[0562] In certain embodiments, the HNH-like domain differs from a sequence of SEQ ID NO: 19 by 1, 2, 3, 4, or 5 residues.

[0563] In certain embodiments, a Cas9 molecule or Cas9 polypeptide comprises an HNH-like domain having an amino acid sequence of Formula XII:

(SEQ ID NO: 20)
D-X₂-D-H-I-X₅-P-Q-X₇-F-X₉-X₁₀-D-X₁₂-S-I-D-N-X₁₆-V-L-
X₁₉-X₂₀-S-X₂₂-X₂₃-N,

wherein

[0564] X₂ is selected from I and V;

[0565] X₅ is selected from I and V;

[0566] X₇ is selected from A and S;

[0567] X₉ is selected from I and L;

[0568] X₁₀ is selected from K and T;

[0569] X₁₂ is selected from D and N;

[0570] X₁₆ is selected from R, K and L;

[0571] X₁₉ is selected from T and V;

[0572] X₂₀ is selected from S and R;

[0573] X₂₂ is selected from K, D and A; and

[0574] X₂₃ is selected from E, K, G and N (e.g., the Cas9 molecule or Cas9 polypeptide can comprise an HNH-like domain as described herein).

[0575] In certain embodiments, the HNH-like domain differs from a sequence of SEQ ID NO: 20 by as many as 1 but not more than 2, 3, 4, or 5 residues.

[0576] In certain embodiments, a Cas9 molecule or Cas9 polypeptide comprises the amino acid sequence of formula XIII:

(SEQ ID NO: 21)
L-Y-Y-L-Q-N-G-X₁′-D-M-Y-X₂′-X₃′-X₄′-X₅′-L-D-I-
X₆′-X₇′-L-S-X₈′-Y-Z-N-R-X₉′-K-X₁₀′-D-X₁₁′-V-P,

wherein

[0577] X₁′ is selected from K and R;

[0578] X₂′ is selected from V and T;

[0579] X₃′ is selected from G and D;

[0580] X₄′ is selected from E, Q and D;

[0581] X₅′ is selected from E and D;

[0582] X₆′ is selected from D, N and H;

[0583] X₇′ is selected from Y, R and N;

[0584] X₈′ is selected from Q, D and N;

[0585] X₉′ is selected from G and E;

[0586] X₁₀′ is selected from S and G;

[0587] X₁₁′ is selected from D and N; and

[0588] Z is an HNH-like domain, e.g., as described above.

[0589] In certain embodiment, a Cas9 molecule or Cas9 polypeptide comprises an amino acid sequence that differs from a sequence of SEQ ID NO:21 by as many as 1 but not more than 2, 3, 4, or 5 residues.

[0590] In certain embodiments, the HNH-like domain differs from a sequence of an HNH-like domain disclosed herein, e.g., in SEQ ID Nos: 178-252, as many as 1 but not more than 2, 3, 4, or 5 residues. In certain embodiments, 1 or both of the highly conserved residues of SEQ ID Nos: 178-252 are present.

[0591] In certain embodiments, the HNH-like domain differs from a sequence of an HNH-like domain disclosed herein, e.g., in SEQ ID Nos: 253-302, as many as 1 but not more than 2, 3, 4, or 5 residues. In certain embodiments, 1, 2, all 3 of the highly conserved residues of SEQ ID Nos: 253-302 are present.

[0592] Cas9 Activities

[0593] In certain embodiments, the Cas9 molecule or Cas9 polypeptide is capable of cleaving a target nucleic acid molecule. Typically wild-type Cas9 molecules cleave both strands of a target nucleic acid molecule. Cas9 molecules and Cas9 polypeptides can be engineered to alter nuclease cleavage (or other properties), e.g., to provide a Cas9 molecule or Cas9 polypeptide which is a nickase, or which lacks the ability to cleave target nucleic acid. A Cas9 molecule or Cas9 polypeptide that is capable of cleaving a target nucleic acid molecule is referred to herein as an eaCas9 (an enzymatically active Cas9) molecule or eaCas9 polypeptide.

[0594] In certain embodiments, an eaCas9 molecule or eaCas9 polypeptide comprises one or more of the following enzymatic activities:

[0595] a nickase activity, i.e., the ability to cleave a single strand, e.g., the non-complementary strand or the complementary strand, of a nucleic acid molecule;

[0596] a double stranded nuclease activity, i.e., the ability to cleave both strands of a double stranded nucleic acid and create a double stranded break, which in an embodiment is the presence of two nickase activities;

[0597] an endonuclease activity;

[0598] an exonuclease activity; and

[0599] a helicase activity, i.e., the ability to unwind the helical structure of a double stranded nucleic acid.

[0600] In certain embodiments, an enzymatically active Cas9 or eaCas9 molecule or eaCas9 polypeptide cleaves both DNA strands and results in a double stranded break. In certain embodiments, an eaCas9 molecule or eaCas9 polypeptide cleaves only one strand, e.g., the strand to which the gRNA hybridizes to, or the strand complementary to the strand the gRNA hybridizes with. In an embodiment, an eaCas9 molecule or eaCas9 polypeptide comprises cleavage activity associated with an HNH domain. In an embodiment, an eaCas9 molecule or eaCas9 polypeptide comprises cleavage activity associated with a RuvC domain. In an embodiment, an eaCas9 molecule or eaCas9 polypeptide comprises cleavage activity associated with an HNH domain and cleavage activity associated with a RuvC domain. In an embodiment, an eaCas9 molecule or eaCas9 polypeptide comprises an active, or cleavage competent, HNH domain and an inactive, or cleavage incompetent, RuvC domain. In an embodiment, an eaCas9 molecule or eaCas9 polypeptide comprises an inactive, or cleavage incompetent, HNH domain and an active, or cleavage competent, RuvC domain.

[0601] Some Cas9 molecules or Cas9 polypeptides have the ability to interact with a gRNA molecule, and in conjunction with the gRNA molecule localize to a core target domain, but are incapable of cleaving the target nucleic acid, or incapable of cleaving at efficient rates. Cas9 molecules having no, or no substantial, cleavage activity are referred to herein as an eiCas9 molecule or eiCas9 polypeptide. For example, an eiCas9 molecule or eiCas9 polypeptide can lack cleavage activity or have substantially less, e.g., less than 20, 10, 5, 1 or 0.1% of the cleavage activity of a reference Cas9 molecule or eiCas9 polypeptide, as measured by an assay described herein.

[0602] Targeting and PAMs

[0603] A Cas9 molecule or Cas9 polypeptide that can interact with a gRNA molecule and, in concert with the gRNA molecule, localizes to a site which comprises a target domain, and in certain embodiments, a PAM sequence.

[0604] In certain embodiments, the ability of an eaCas9 molecule or eaCas9 polypeptide to interact with and cleave a target nucleic acid is PAM sequence dependent. A PAM sequence is a sequence in the target nucleic acid. In an embodiment, cleavage of the target nucleic acid occurs upstream from the PAM sequence. eaCas9 molecules from different bacterial species can recognize different sequence motifs (e.g., PAM sequences). In an embodiment, an eaCas9 molecule of S. pyogenes recognizes the sequence motif NGG and directs cleavage of a target nucleic acid sequence 1 to 10, e.g., 3 to 5, bp upstream from that sequence (see, e.g., Mali 2013). In an embodiment, an eaCas9 molecule of S. thermophilus recognizes the sequence motif NGGNG and/or NNAGAAW (W=A or T) and directs cleavage of a target nucleic acid sequence 1 to 10, e.g., 3 to 5, bp upstream from these sequences (see, e.g., Horvath 2010; Deveau 2008). In an embodiment, an eaCas9 molecule of S. mutans recognizes the sequence motif NGG and/or NAAR (R=A or G) and directs cleavage of a target nucleic acid sequence 1 to 10, e.g., 3 to 5, bp upstream from this sequence (see, e.g., Deveau 2008). In an embodiment, an eaCas9 molecule of S. aureus recognizes the sequence motif NNGRR (R=A or G) and directs cleavage of a target nucleic acid sequence 1 to 10, e.g., 3 to 5, bp upstream from that sequence. In an embodiment, an eaCas9 molecule of S. aureus recognizes the sequence motif NNGRRN (R=A or G) and directs cleavage of a target nucleic acid sequence 1 to 10, e.g., 3 to 5, bp upstream from that sequence. In an embodiment, an eaCas9 molecule of S. aureus recognizes the sequence motif NNGRRT (R=A or G) and directs cleavage of a target nucleic acid sequence 1 to 10, e.g., 3 to 5, base pairs upstream from that sequence. In an embodiment, an eaCas9 molecule of S. aureus recognizes the sequence motif NNGRRV (R=A or G) and directs cleavage of a target nucleic acid sequence 1 to 10, e.g., 3 to 5, bp upstream from that sequence. The ability of a Cas9 molecule to recognize a PAM sequence can be determined, e.g., using a transformation assay as described in Jinek 2012. In the aforementioned embodiments, N can be any nucleotide residue, e.g., any of A, G, C, or T.

[0605] As is discussed herein, Cas9 molecules can be engineered to alter the PAM specificity of the Cas9 molecule.

[0606] Exemplary naturally occurring Cas9 molecules have been described previously (see, e.g., Chylinski 2013). Such Cas9 molecules include Cas9 molecules of a cluster 1 bacterial family, cluster 2 bacterial family, cluster 3 bacterial family, cluster 4 bacterial family, cluster 5 bacterial family, cluster 6 bacterial family, a cluster 7 bacterial family, a cluster 8 bacterial family, a cluster 9 bacterial family, a cluster 10 bacterial family, a cluster 11 bacterial family, a cluster 12 bacterial family, a cluster 13 bacterial family, a cluster 14 bacterial family, a cluster 15 bacterial family, a cluster 16 bacterial family, a cluster 17 bacterial family, a cluster 18 bacterial family, a cluster 19 bacterial family, a cluster 20 bacterial family, a cluster 21 bacterial family, a cluster 22 bacterial family, a cluster 23 bacterial family, a cluster 24 bacterial family, a cluster 25 bacterial family, a cluster 26 bacterial family, a cluster 27 bacterial family, a cluster 28 bacterial family, a cluster 29 bacterial family, a cluster 30 bacterial family, a cluster 31 bacterial family, a cluster 32 bacterial family, a cluster 33 bacterial family, a cluster 34 bacterial family, a cluster 35 bacterial family, a cluster 36 bacterial family, a cluster 37 bacterial family, a cluster 38 bacterial family, a cluster 39 bacterial family, a cluster 40 bacterial family, a cluster 41 bacterial family, a cluster 42 bacterial family, a cluster 43 bacterial family, a cluster 44 bacterial family, a cluster 45 bacterial family, a cluster 46 bacterial family, a cluster 47 bacterial family, a cluster 48 bacterial family, a cluster 49 bacterial family, a cluster 50 bacterial family, a cluster 51 bacterial family, a cluster 52 bacterial family, a cluster 53 bacterial family, a cluster 54 bacterial family, a cluster 55 bacterial family, a cluster 56 bacterial family, a cluster 57 bacterial family, a cluster 58 bacterial family, a cluster 59 bacterial family, a cluster 60 bacterial family, a cluster 61 bacterial family, a cluster 62 bacterial family, a cluster 63 bacterial family, a cluster 64 bacterial family, a cluster 65 bacterial family, a cluster 66 bacterial family, a cluster 67 bacterial family, a cluster 68 bacterial family, a cluster 69 bacterial family, a cluster 70 bacterial family, a cluster 71 bacterial family, a cluster 72 bacterial family, a cluster 73 bacterial family, a cluster 74 bacterial family, a cluster 75 bacterial family, a cluster 76 bacterial family, a cluster 77 bacterial family, or a cluster 78 bacterial family. Exemplary naturally occurring Cas9 molecules include a Cas9 molecule of a cluster 1 bacterial family. Examples include a Cas9 molecule of: S. aureus, S. pyogenes (e.g., strain SF370, MGAS10270, MGAS10750, MGAS2096, MGAS315, MGAS5005, MGAS6180, MGAS9429, NZ131 and SSI-1), S. thermophilus (e.g., strain LMD-9), S. pseudoporcinus (e.g., strain SPIN 20026), S. mutans (e.g., strain UA159, NN2025), S. macacae (e.g., strain NCTC11558), S. gallolyticus (e.g., strain UCN34, ATCC BAA-2069), S. equines (e.g., strain ATCC 9812, MGCS 124), S. dysdalactiae (e.g., strain GGS 124), S. bovis (e.g., strain ATCC 700338), S. anginosus (e.g., strain F0211), S. agalactiae (e.g., strain NEM316, A909), Listeria monocytogenes (e.g., strain F6854), Listeria innocua (L. innocua, e.g., strain Clip11262), Enterococcus italicus (e.g., strain DSM 15952), or Enterococcus faecium (e.g., strain 1,231,408).

[0607] In certain embodiments, a Cas9 molecule or Cas9 polypeptide comprises an amino acid sequence: having 60%, 65%, 70%, 75%, 80%, 85%, 90%, 95%, 96%, 97%, 98% or 99% homology with; differs at no more than, 2, 5, 10, 15, 20, 30, or 40% of the amino acid residues when compared with; differs by at least 1, 2, 5, 10 or 20 amino acids, but by no more than 100, 80, 70, 60, 50, 40 or 30 amino acids from; or is identical to any Cas9 molecule sequence described herein, or to a naturally occurring Cas9 molecule sequence, e.g., a Cas9 molecule from a species listed herein (e.g., SEQ ID NO:1-4 or described in Chylinski 2013 or Hou 2013). In an embodiment, the Cas9 molecule or Cas9 polypeptide comprises one or more of the following activities: a nickase activity; a double stranded cleavage activity (e.g., an endonuclease and/or exonuclease activity); a helicase activity; or the ability, together with a gRNA molecule, to localize to a target nucleic acid.

[0608] A comparison of the sequence of a number of Cas9 molecules indicate that certain regions are conserved. These are identified below as:

[0609] region 1 (residues 1 to 180, or in the case of region 1, residues 120 to 180)

[0610] region 2 (residues 360 to 480);

[0611] region 3 (residues 660 to 720);

[0612] region 4 (residues 817 to 900); and

[0613] region 5 (residues 900 to 960).

[0614] In an embodiment, a Cas9 molecule or Cas9 polypeptide comprises regions 1-5, together with sufficient additional Cas9 molecule sequence to provide a biologically active molecule, e.g., a Cas9 molecule having at least one activity described herein. In an embodiment, each of regions 1-5, independently, have 50%, 60%, 70%, 80%, 85%, 90%, 95%, 96%, 97%, 98% or 99% homology with the corresponding residues of a Cas9 molecule or Cas9 polypeptide described herein, e.g., a sequence from SEQ ID Nos: 1-4.

[0615] In an embodiment, a Cas9 molecule or Cas9 polypeptide comprises an amino acid sequence referred to as region 1:

[0616] having 50%, 60%, 70%, 80%, 85%, 90%, 95%, 96%, 97%, 98% or 99% homology with amino acids 1-180 of the amino acid sequence of Cas9 of S. pyogenes;

[0617] differs by at least 1, 2, 5, 10 or 20 amino acids but by no more than 90, 80, 70, 60, 50, 40 or 30 amino acids from amino acids 1-180 of the amino acid sequence of Cas9 of S. pyogenes, S. thermophilus, S. mutans, or Listeria innocua; or is identical to amino acids 1-180 of the amino acid sequence of Cas9 of S. pyogenes, S. thermophilus, S. mutans, or L. innocua.

[0618] In an embodiment, a Cas9 molecule or Cas9 polypeptide comprises an amino acid sequence referred to as region 1′:

[0619] having 55%, 60%, 65%, 70%, 75%, 80%, 85%, 90%, 95%, 96%, 97%, 98% or 99% homology with amino acids 120-180 of the amino acid sequence of Cas9 of S. pyogenes, S. thermophilus, S. mutans or L. innocua;

[0620] differs by at least 1, 2, or 5 amino acids but by no more than 35, 30, 25, 20 or 10 amino acids from amino acids 120-180 of the amino acid sequence of Cas9 of S. pyogenes, S. thermophilus, S. mutans, or L. innocua; or is identical to amino acids 120-180 of the amino acid sequence of Cas9 of S. pyogenes, S. thermophilus, S. mutans, or L. innocua.

[0621] In an embodiment, a Cas9 molecule or Cas9 polypeptide comprises an amino acid sequence referred to as region 2:

[0622] having 50%, 55%, 60%, 65%, 70%, 75%, 80%, 85%, 90%, 95%, 96%, 97%, 98% or 99% homology with amino acids 360-480 of the amino acid sequence of Cas9 of S. pyogenes, S. thermophilus, S. mutans, or L. innocua;

[0623] differs by at least 1, 2, or 5 amino acids but by no more than 35, 30, 25, 20 or 10 amino acids from amino acids 360-480 of the amino acid sequence of Cas9 of S. pyogenes, S. thermophilus, S. mutans, or L. innocua; or

[0624] is identical to amino acids 360-480 of the amino acid sequence of Cas9 of S. pyogenes, S. thermophilus, S. mutans, or L. innocua.

[0625] In certain embodiments, a Cas9 molecule or Cas9 polypeptide comprises an amino acid sequence referred to as region 3:

[0626] having 55%, 60%, 65%, 70%, 75%, 80%, 85%, 90%, 95%, 96%, 97%, 98%, or 99% homology with amino acids 660-720 of the amino acid sequence of Cas9 of S. pyogenes, S. thermophilus, S. mutans or L. innocua;

[0627] differs by at least 1, 2, or 5 amino acids but by no more than 35, 30, 25, 20 or 10 amino acids from amino acids 660-720 of the amino acid sequence of Cas9 of S. pyogenes, S. thermophilus, S. mutans or L. innocua; or

[0628] is identical to amino acids 660-720 of the amino acid sequence of Cas9 of S. pyogenes, S. thermophilus, S. mutans or L. innocua.

[0629] In an embodiment, a Cas9 molecule or Cas9 polypeptide comprises an amino acid sequence referred to as region 4:

[0630] having 50%, 55%, 60%, 65%, 70%, 75%, 80%, 85%, 90%, 95%, 96%, 97%, 98%, or 99% homology with amino acids 817-900 of the amino acid sequence of Cas9 of S. pyogenes, S. thermophilus, S. mutans, or L. innocua;

[0631] differs by at least 1, 2, or 5 amino acids but by no more than 35, 30, 25, 20 or 10 amino acids from amino acids 817-900 of the amino acid sequence of Cas9 of S. pyogenes, S. thermophilus, S. mutans, or L. innocua; or

[0632] is identical to amino acids 817-900 of the amino acid sequence of Cas9 of S. pyogenes, S. thermophilus, S. mutans, or L. innocua.

[0633] In an embodiment, a Cas9 molecule or Cas9 polypeptide comprises an amino acid sequence referred to as region 5:

[0634] having 50%, 55%, 60%, 65%, 70%, 75%, 80%, 85%, 90%, 95%, 96%, 97%, 98%, or 99% homology with amino acids 900-960 of the amino acid sequence of Cas9 of S. pyogenes, S. thermophilus, S. mutans, or L. innocua;

[0635] differs by at least 1, 2, or 5 amino acids but by no more than 35, 30, 25, 20 or 10 amino acids from amino acids 900-960 of the amino acid sequence of Cas9 of S. pyogenes, S. thermophilus, S. mutans, or L. innocua; or

[0636] is identical to amino acids 900-960 of the amino acid sequence of Cas9 of S. pyogenes, S. thermophilus, S. mutans, or L. innocua.

[0637] Engineered Or Altered Cas9 Molecules And Cas9 Polypeptides

[0638] Cas9 molecules and Cas9 polypeptides described herein can possess any of a number of properties, including: nickase activity, nuclease activity (e.g., endonuclease and/or exonuclease activity); helicase activity; the ability to associate functionally with a gRNA molecule; and the ability to target (or localize to) a site on a nucleic acid (e.g., PAM recognition and specificity). In certain embodiments, a Cas9 molecule or Cas9 polypeptide can include all or a subset of these properties. In a typical embodiment, a Cas9 molecule or Cas9 polypeptide has the ability to interact with a gRNA molecule and, in concert with the gRNA molecule, localize to a site in a nucleic acid. Other activities, e.g., PAM specificity, cleavage activity, or helicase activity can vary more widely in Cas9 molecules and Cas9 polypeptides.

[0639] Cas9 molecules include engineered Cas9 molecules and engineered Cas9 polypeptides (engineered, as used in this context, means merely that the Cas9 molecule or Cas9 polypeptide differs from a reference sequences, and implies no process or origin limitation). An engineered Cas9 molecule or Cas9 polypeptide can comprise altered enzymatic properties, e.g., altered nuclease activity, (as compared with a naturally occurring or other reference Cas9 molecule) or altered helicase activity. As discussed herein, an engineered Cas9 molecule or Cas9 polypeptide can have nickase activity (as opposed to double-strand nuclease activity). In an embodiment an engineered Cas9 molecule or Cas9 polypeptide can have an alteration that alters its size, e.g., a deletion of amino acid sequence that reduces its size, e.g., without significant effect on one or more, or any Cas9 activity. In an embodiment, an engineered Cas9 molecule or Cas9 polypeptide can comprise an alteration that affects PAM recognition. For example, an engineered Cas9 molecule can be altered to recognize a PAM sequence other than that recognized by the endogenous wild-type PI domain. In an embodiment a Cas9 molecule or Cas9 polypeptide can differ in sequence from a naturally occurring Cas9 molecule but not have significant alteration in one or more Cas9 activities.

[0640] Cas9 molecules or Cas9 polypeptides with desired properties can be made in a number of ways, e.g., by alteration of a parental, e.g., naturally occurring, Cas9 molecules or Cas9 polypeptides, to provide an altered Cas9 molecule or Cas9 polypeptide having a desired property. For example, one or more mutations or differences relative to a parental Cas9 molecule, e.g., a naturally occurring or engineered Cas9 molecule, can be introduced. Such mutations and differences comprise: substitutions (e.g., conservative substitutions or substitutions of non-essential amino acids); insertions; or deletions. In an embodiment, a Cas9 molecule or Cas9 polypeptide can comprises one or more mutations or differences, e.g., at least 1, 2, 3, 4, 5, 10, 15, 20, 30, 40 or 50 mutations but less than 200, 100, or 80 mutations relative to a reference, e.g., a parental, Cas9 molecule.

[0641] In certain embodiments, a mutation or mutations do not have a substantial effect on a Cas9 activity, e.g., a Cas9 activity described herein. In other embodiments, a mutation or mutations have a substantial effect on a Cas9 activity, e.g., a Cas9 activity described herein.

[0642] Non-Cleaving and Modified-Cleavage Cas9 Molecules and Cas9 Polypeptides

[0643] In an embodiment, a Cas9 molecule or Cas9 polypeptide comprises a cleavage property that differs from naturally occurring Cas9 molecules, e.g., that differs from the naturally occurring Cas9 molecule having the closest homology. For example, a Cas9 molecule or Cas9 polypeptide can differ from naturally occurring Cas9 molecules, e.g., a Cas9 molecule of S. pyogenes, as follows: its ability to modulate, e.g., decreased or increased, cleavage of a double stranded nucleic acid (endonuclease and/or exonuclease activity), e.g., as compared to a naturally occurring Cas9 molecule (e.g., a Cas9 molecule of S. pyogenes); its ability to modulate, e.g., decreased or increased, cleavage of a single-strand of a nucleic acid, e.g., a non-complementary strand of a nucleic acid molecule or a complementary strand of a nucleic acid molecule (nickase activity), e.g., as compared to a naturally occurring Cas9 molecule (e.g., a Cas9 molecule of S. pyogenes); or the ability to cleave a nucleic acid molecule, e.g., a double stranded or single stranded nucleic acid molecule, can be eliminated.

[0644] In certain embodiments, an eaCas9 molecule or eaCas9 polypeptide comprises one or more of the following activities: cleavage activity associated with an N-terminal RuvC-like domain; cleavage activity associated with an HNH-like domain; cleavage activity associated with an HNH-like domain and cleavage activity associated with an N-terminal RuvC-like domain.

[0645] In certain embodiments, an eaCas9 molecule or eaCas9 polypeptide comprises an active, or cleavage competent, HNH-like domain (e.g., an HNH-like domain described herein) and an inactive, or cleavage incompetent, N-terminal RuvC-like domain. An exemplary inactive, or cleavage incompetent N-terminal RuvC-like domain can have a mutation of an aspartic acid in an N-terminal RuvC-like domain, e.g., an aspartic acid at position 10 of SEQ ID NO:2, e.g., can be substituted with an alanine. In an embodiment, the eaCas9 molecule or eaCas9 polypeptide differs from wild-type in the N-terminal RuvC-like domain and does not cleave the target nucleic acid, or cleaves with significantly less efficiency, e.g., less than 20, 10, 5, 1 or 0.1% of the cleavage activity of a reference Cas9 molecule, e.g., as measured by an assay described herein. The reference Cas9 molecule can by a naturally occurring unmodified Cas9 molecule, e.g., a naturally occurring Cas9 molecule such as a Cas9 molecule of S. pyogenes, S. aureus, or S. thermophilus. In an embodiment, the reference Cas9 molecule is the naturally occurring Cas9 molecule having the closest sequence identity or homology.

[0646] In certain embodiments, an eaCas9 molecule or eaCas9 polypeptide comprises an inactive, or cleavage incompetent, HNH domain and an active, or cleavage competent, N-terminal RuvC-like domain (e.g., a RuvC-like domain described herein). Exemplary inactive, or cleavage incompetent HNH-like domains can have a mutation at one or more of: a histidine in an HNH-like domain, for example, at position 856 of the S. pyogenes Cas9 sequence (SEQ ID NO:2), e.g., can be substituted with an alanine; and one or more asparagines in an HNH-like domain, for example, at position 870 and/or 879 of the S. pyogenes Cas9 sequence (SEQ ID NO:2) e.g., can be substituted with an alanine. In an embodiment, the eaCas9 differs from wild-type in the HNH-like domain and does not cleave the target nucleic acid, or cleaves with significantly less efficiency, e.g., less than 20, 10, 5, 1 or 0.1% of the cleavage activity of a reference Cas9 molecule, e.g., as measured by an assay described herein. The reference Cas9 molecule can by a naturally occurring unmodified Cas9 molecule, e.g., a naturally occurring Cas9 molecule such as a Cas9 molecule of S. pyogenes, S. aureus, or S. thermophilus. In an embodiment, the reference Cas9 molecule is the naturally occurring Cas9 molecule having the closest sequence identity or homology.

[0647] In certain embodiments, exemplary Cas9 activities comprise one or more of PAM specificity, cleavage activity, and helicase activity. A mutation(s) can be present, e.g., in: one or more RuvC domains, e.g., an N-terminal RuvC domain; an HNH domain; a region outside the RuvC domains and the HNH domain. In an embodiment, a mutation(s) is present in a RuvC domain. In an embodiment, a mutation(s) is present in an HNH domain. In an embodiment, mutations are present in both a RuvC domain and an HNH domain.

[0648] Exemplary mutations that may be made in the RuvC domain or HNH domain with reference to the S. pyogenes Cas9 sequence include: D10A, E762A, H840A, N854A, N863A and/or D986A. Exemplary mutations that may be made in the RuvC domain with reference to the S. aureus Cas9 sequence include N580A.

[0649] In an embodiment, a Cas9 molecule is an eiCas9 molecule comprising one or more differences in a RuvC domain and/or in an HNH domain as compared to a reference Cas9 molecule, and the eiCas9 molecule does not cleave a nucleic acid, or cleaves with significantly less efficiency than does wild type, e.g., when compared with wild type in a cleavage assay, e.g., as described herein, cuts with less than 50, 25, 10, or 1% of a reference Cas9 molecule, as measured by an assay described herein.

[0650] Whether or not a particular sequence, e.g., a substitution, may affect one or more activity, such as targeting activity, cleavage activity, etc., can be evaluated or predicted, e.g., by evaluating whether the mutation is conservative. In an embodiment, a “non-essential” amino acid residue, as used in the context of a Cas9 molecule, is a residue that can be altered from the wild-type sequence of a Cas9 molecule, e.g., a naturally occurring Cas9 molecule, e.g., an eaCas9 molecule, without abolishing or more preferably, without substantially altering a Cas9 activity (e.g., cleavage activity), whereas changing an “essential” amino acid residue results in a substantial loss of activity (e.g., cleavage activity).

[0651] In an embodiment, a Cas9 molecule comprises a cleavage property that differs from naturally occurring Cas9 molecules, e.g., that differs from the naturally occurring Cas9 molecule having the closest homology. For example, a Cas9 molecule can differ from naturally occurring Cas9 molecules, e.g., a Cas9 molecule of S. aureus or S. pyogenes as follows: its ability to modulate, e.g., decreased or increased, cleavage of a double stranded break (endonuclease and/or exonuclease activity), e.g., as compared to a naturally occurring Cas9 molecule (e.g., a Cas9 molecule of S. aureus or S. pyogenes); its ability to modulate, e.g., decreased or increased, cleavage of a single-strand of a nucleic acid, e.g., a non-complimentary strand of a nucleic acid molecule or a complementary strand of a nucleic acid molecule (nickase activity), e.g., as compared to a naturally occurring Cas9 molecule (e.g., a Cas9 molecule of S. aureus or S. pyogenes); or the ability to cleave a nucleic acid molecule, e.g., a double stranded or single stranded nucleic acid molecule, can be eliminated. In certain embodiments, the nickase is S. aureus Cas9-derived nickase comprising the sequence of SEQ ID NO: 16302 (D10A) or SEQ ID NO: 16303 (N580A) (Friedland 2015).

[0652] In certain embodiments, the altered Cas9 molecule is an eaCas9 molecule comprising one or more of the following activities: cleavage activity associated with a RuvC domain; cleavage activity associated with an HNH domain; cleavage activity associated with an HNH domain and cleavage activity associated with a RuvC domain.

[0653] In an embodiment, the altered Cas9 molecule is an eiCas9 molecule which does not cleave a nucleic acid molecule (either double stranded or single stranded nucleic acid molecules) or cleaves a nucleic acid molecule with significantly less efficiency, e.g., less than 20, 10, 5, 1 or 0.1% of the cleavage activity of a reference Cas9 molecule, e.g., as measured by an assay described herein. The reference Cas9 molecule can be a naturally occurring unmodified Cas9 molecule, e.g., a naturally occurring Cas9 molecule such as a Cas9 molecule of S. pyogenes, S. thermophilus, S. aureus, C. jejuni or N. meningitidis. In an embodiment, the reference Cas9 molecule is the naturally occurring Cas9 molecule having the closest sequence identity or homology. In an embodiment, the eiCas9 molecule lacks substantial cleavage activity associated with a RuvC domain and cleavage activity associated with an HNH domain.

[0654] In certain embodiments, the altered Cas9 molecule or Cas9 polypeptide, e.g., an eaCas9 molecule or eaCas9 polypeptide, can be a fusion, e.g., of two of more different Cas9 molecules, e.g., of two or more naturally occurring Cas9 molecules of different species. For example, a fragment of a naturally occurring Cas9 molecule of one species can be fused to a fragment of a Cas9 molecule of a second species. As an example, a fragment of a Cas9 molecule of S. pyogenes comprising an N-terminal RuvC-like domain can be fused to a fragment of Cas9 molecule of a species other than S. pyogenes (e.g., S. thermophilus) comprising an HNH-like domain.

[0655] Cas9 with Altered or No PAM Recognition

[0656] Naturally-occurring Cas9 molecules can recognize specific PAM sequences, for example the PAM recognition sequences described above for, e.g., S. pyogenes, S. thermophilus, S. mutans, and S. aureus.

[0657] In certain embodiments, a Cas9 molecule or Cas9 polypeptide has the same PAM specificities as a naturally occurring Cas9 molecule. In other embodiments, a Cas9 molecule or Cas9 polypeptide has a PAM specificity not associated with a naturally occurring Cas9 molecule, or a PAM specificity not associated with the naturally occurring Cas9 molecule to which it has the closest sequence homology. For example, a naturally occurring Cas9 molecule can be altered, e.g., to alter PAM recognition, e.g., to alter the PAM sequence that the Cas9 molecule or Cas9 polypeptide recognizes in order to decrease off-target sites and/or improve specificity; or eliminate a PAM recognition requirement. In certain embodiments, a Cas9 molecule or Cas9 polypeptide can be altered, e.g., to increase length of PAM recognition sequence and/or improve Cas9 specificity to high level of identity (e.g., 98%, 99% or 100% match between gRNA and a PAM sequence), e.g., to decrease off-target sites and/or increase specificity. In certain embodiments, the length of the PAM recognition sequence is at least 4, 5, 6, 7, 8, 9, 10 or 15 amino acids in length. In an embodiment, the Cas9 specificity requires at least 90%, 95%, 96%, 97%, 98%, 99% or more homology between the gRNA and the PAM sequence. Cas9 molecules or Cas9 polypeptides that recognize different PAM sequences and/or have reduced off-target activity can be generated using directed evolution. Exemplary methods and systems that can be used for directed evolution of Cas9 molecules are described (see, e.g., Esvelt 2011). Candidate Cas9 molecules can be evaluated, e.g., by methods described below.

[0658] Size-Optimized Cas9 Molecules

[0659] Engineered Cas9 molecules and engineered Cas9 polypeptides described herein include a Cas9 molecule or Cas9 polypeptide comprising a deletion that reduces the size of the molecule while still retaining desired Cas9 properties, e.g., essentially native conformation, Cas9 nuclease activity, and/or target nucleic acid molecule recognition. Provided herein are Cas9 molecules or Cas9 polypeptides comprising one or more deletions and optionally one or more linkers, wherein a linker is disposed between the amino acid residues that flank the deletion. Methods for identifying suitable deletions in a reference Cas9 molecule, methods for generating Cas9 molecules with a deletion and a linker, and methods for using such Cas9 molecules will be apparent to one of ordinary skill in the art upon review of this document.

[0660] A Cas9 molecule, e.g., a S. aureus or S. pyogenes Cas9 molecule, having a deletion is smaller, e.g., has reduced number of amino acids, than the corresponding naturally-occurring Cas9 molecule. The smaller size of the Cas9 molecules allows increased flexibility for delivery methods, and thereby increases utility for genome-editing. A Cas9 molecule can comprise one or more deletions that do not substantially affect or decrease the activity of the resultant Cas9 molecules described herein. Activities that are retained in the Cas9 molecules comprising a deletion as described herein include one or more of the following:

[0661] a nickase activity, i.e., the ability to cleave a single strand, e.g., the non-complementary strand or the complementary strand, of a nucleic acid molecule; a double stranded nuclease activity, i.e., the ability to cleave both strands of a double stranded nucleic acid and create a double stranded break, which in an embodiment is the presence of two nickase activities; an endonuclease activity; an exonuclease activity; a helicase activity, i.e., the ability to unwind the helical structure of a double stranded nucleic acid; and recognition activity of a nucleic acid molecule, e.g., a target nucleic acid or a gRNA molecule.

[0662] Activity of the Cas9 molecules described herein can be assessed using the activity assays described herein or in the art.

[0663] Identifying Regions Suitable for Deletion

[0664] Suitable regions of Cas9 molecules for deletion can be identified by a variety of methods. Naturally-occurring orthologous Cas9 molecules from various bacterial species can be modeled onto the crystal structure of S. pyogenes Cas9 (Nishimasu 2014) to examine the level of conservation across the selected Cas9 orthologs with respect to the three-dimensional conformation of the protein. Less conserved or unconserved regions that are spatially located distant from regions involved in Cas9 activity, e.g., interface with the target nucleic acid molecule and/or gRNA, represent regions or domains are candidates for deletion without substantially affecting or decreasing Cas9 activity.

[0665] Nucleic Acids Encoding Cas9 Molecules

[0666] Nucleic acids encoding the Cas9 molecules or Cas9 polypeptides, e.g., an eaCas9 molecule or eaCas9 polypeptides are provided herein. Exemplary nucleic acids encoding Cas9 molecules or Cas9 polypeptides have been described previously (see, e.g., Cong 2013; Wang 2013; Mali 2013; Jinek 2012).

[0667] In an embodiment, a nucleic acid encoding a Cas9 molecule or Cas9 polypeptide can be a synthetic nucleic acid sequence. For example, the synthetic nucleic acid molecule can be chemically modified, e.g., as described herein. In an embodiment, the Cas9 mRNA has one or more (e.g., all of the following properties: it is capped, polyadenylated, substituted with 5-methylcytidine and/or pseudouridine.

[0668] In addition, or alternatively, the synthetic nucleic acid sequence can be codon optimized, e.g., at least one non-common codon or less-common codon has been replaced by a common codon. For example, the synthetic nucleic acid can direct the synthesis of an optimized messenger mRNA, e.g., optimized for expression in a mammalian expression system, e.g., described herein.

[0669] In addition, or alternatively, a nucleic acid encoding a Cas9 molecule or Cas9 polypeptide may comprise a nuclear localization sequence (NLS). Nuclear localization sequences are known in the art.

[0670] An exemplary codon optimized nucleic acid sequence encoding a Cas9 molecule of S. pyogenes is set forth in SEQ ID NO: 22. The corresponding amino acid sequence of an S. pyogenes Cas9 molecule is set forth in SEQ ID NO: 23.

[0671] Exemplary codon optimized nucleic acid sequence encoding a Cas9 molecule of S. aureus is set forth in SEQ ID NO: 26, 39, 16300 and 16301.

[0672] If any of the above Cas9 sequences are fused with a peptide or polypeptide at the C-terminus, it is understood that the stop codon will be removed.

[0673] Other Cas Molecules and Cas Polypeptides

[0674] Various types of Cas molecules or Cas polypeptides can be used to practice the inventions disclosed herein. In some embodiments, Cas molecules of Type II Cas systems are used. In other embodiments, Cas molecules of other Cas systems are used. For example, Type I or Type III Cas molecules may be used. Exemplary Cas molecules (and Cas systems) have been described previously (see, e.g., Haft 2005; Makarova 2011). Exemplary Cas molecules (and Cas systems) are also shown in Table 4.

TABLE 4
Cas Systems

| | | | Structure of | Families (and | |
|---|---|---|---|---|---|
| | | | encoded protein | superfamily) of | |
| Gene | System type | Name from | (PDB | encoded | |
| name^{‡} | or subtype | Haft 2005^{§} | accessions)^{¶} | protein^{#}** | Representatives |
| cas1 | Type I | cas1 | 3GOD, 3LFX | COG1518 | SERP2463, SPy1047 |
| | Type II | | and 2YZS | | and ygbT |
| | Type III | | | | |
| cas2 | Type I | cas2 | 2IVY, 2I8E and | COG1343 and | SERP2462, SPy1048, |
| | Type II | | 3EXC | COG3512 | SPy1723 (N-terminal |
| | Type III | | | | domain) and ygbF |
| cas3′ | Type I^{‡‡} | cas3 | NA | COG1203 | APE1232 and ygcB |
| cas3″ | Subtype I-A | NA | NA | COG2254 | APE1231 and BH0336 |
| | Subtype I-B | | | | |
| cas4 | Subtype I-A | cas4 and csa1 | NA | COG1468 | APE1239 and BH0340 |
| | Subtype I-B | | | | |
| | Subtype I-C | | | | |
| | Subtype I-D | | | | |
| | Subtype II-B | | | | |
| cas5 | Subtype I-A | cas5a, cas5d, | 3KG4 | COG1688 | APE1234, BH0337, |
| | Subtype I-B | cas5e, cas5h, | | (RAMP) | devS and ygcI |
| | Subtype I-C | cas5p, cas5t | | | |
| | Subtype I-E | and cmx5 | | | |
| cas6 | Subtype I-A | cas6 and cmx6 | 3I4H | COG1583 and | PF1131 and slr7014 |
| | Subtype I-B | | | COG5551 | |
| | Subtype I-D | | | (RAMP) | |
| | Subtype III-A | | | | |
| | Subtype III-B | | | | |
| cas6e | Subtype I-E | cse3 | 1WJ9 | (RAMP) | ygcH |
| cas6f | Subtype I-F | csy4 | 2XLJ | (RAMP) | y1727 |
| cas7 | Subtype I-A | csa2, csd2, | NA | COG1857 and | devR and ygcJ |
| | Subtype I-B | cse4, csh2, | | COG3649 | |
| | Subtype I-C | csp1 and cst2 | | (RAMP) | |
| | Subtype I-E | | | | |
| cas8a1 | Subtype I-A^{‡‡} | cmx1, cst1, | NA | BH0338-like | LA3191^{§§} and |
| | | csx8, csx13 | | | PG2018^{§§} |
| | | and CXXC- | | | |
| | | CXXC | | | |
| cas8a2 | Subtype I-A^{‡‡} | csa4 and csx9 | NA | PH0918 | AF0070, AFI873, |
| | | | | | MJ0385, PF0637, |
| | | | | | PH0918 and SSO1401 |
| cas8b | Subtype I-B^{‡‡} | csh1 and | NA | BH0338-like | MTH1090 and |
| | | TM1802 | | | TM1802 |
| cas8c | Subtype I-C^{‡‡} | csd1 and csp2 | NA | BH0338-like | BH0338 |
| cas9 | Type II^{‡‡} | csn1 and csx12 | NA | COG3513 | FTN_0757 and |
| | | | | | SPy1046 |
| cas10 | Type III^{‡‡} | cmr2, csm1 | NA | COG1353 | MTH326, Rv2823c^{§§} |
| | | and csx11 | | | and TM1794^{§§} |
| cas10d | Subtype I-D^{‡‡} | csc3 | NA | COG1353 | slr7011 |
| csy1 | Subtype I-F^{‡‡} | csy1 | NA | y1724-like | y1724 |
| csy2 | Subtype I-F | csy2 | NA | (RAMP) | y1725 |
| csy3 | Subtype I-F | csy3 | NA | (RAMP) | y1726 |
| cse1 | Subtype I-E | cse1 | NA | YgcL-like | ygcL |
| cse2 | Subtype I-E | cse2 | 2ZCA | YgcK-like | ygcK |
| csc1 | Subtype I-D | csc1 | NA | alr1563-like | alr1563 |
| | | | | (RAMP) | |
| csc2 | Subtype I-D | csc1 and csc2 | NA | COG1337 | slr7012 |
| | | | | (RAMP) | |
| csa5 | Subtype I-A | csa5 | NA | AF1870 | AF1870, MJ0380, |
| | | | | | PF0643 and SSO1398 |
| csn2 | | csn2 | NA | SPy1049-like | SPy1049 |
| csm2 | Subtype III-A^{‡‡} | csm2 | NA | COG1421 | MTH1081 and |
| | | | | | SERP2460 |
| csm3 | Subtype III-A | csc2 and csm3 | NA | COG1337 | MTH1080 and |
| | | | | (RAMP) | SERP2459 |
| csm4 | Subtype III-A | csm4 | NA | COG1567 | MTH1079 and |
| | | | | (RAMP) | SERP2458 |
| csm5 | Subtype III-A | csm5 | NA | COG1332 | MTH1078 and |
| | | | | (RAMP) | SERP2457 |
| csm6 | Subtype III-A | APE2256 and | 2WTE | COG1517 | APE2256 and |
| | | csm6 | | | SS01445 |
| cmr1 | Subtype III-B | cmr1 | NA | COG1367 | PF1130 |
| | | | | (RAMP) | |
| cmr3 | Subtype III-B | cmr3 | NA | COG1769 | PF1128 |
| | | | | (RAMP) | |
| cmr4 | Subtype III-B | cmr4 | NA | COG1336 | PF1126 |
| | | | | (RAMP) | |
| cmr5 | Subtype III-B^{‡‡} | cmr5 | 2ZOP and 20EB | COG3337 | MTH324 and PF1125 |
| cmr6 | Subtype III-B | cmr6 | NA | COG1604 | PF1124 |
| | | | | (RAMP) | |
| csb1 | Subtype I-U | GSU0053 | NA | (RAMP) | Balac_1306 and |
| | | | | | GSU0053 |
| csb2 | Subtype I-U^{‡‡} | NA | NA | (RAMP) | Balac_1305 and |
| | | | | | GSU0054 |
| csb3 | Subtype I-U | NA | NA | (RAMP) | Balac_1303^{§§} |
| csx17 | Subtype I-U | NA | NA | NA | Btus_2683 |
| csx14 | Subtype I-U | NA | NA | NA | GSU0052 |
| csx10 | Subtype I-U | csx10 | NA | (RAMP) | Caur_2274 |
| csx16 | Subtype III-U | VVA1548 | NA | NA | VVA1548 |
| csaX | Subtype III-U | csaX | NA | NA | SSO1438 |
| csx3 | Subtype III-U | csx3 | NA | NA | AF1864 |
| csx1 | Subtype III-U | csa3, csx1, | 1XMX and 2171 | COG1517 and | MJ1666, NE0113, |
| | | csx2, DXTHG, | | COG4006 | PF1127 and TM1812 |
| | | NE0113 and | | | |
| | | TIGR02710 | | | |
| csx15 | Unkown | NA | NA | TTE2665 | TTE2665 |
| csf1 | Type U | csf1 | NA | NA | AFE_1038 |
| csf2 | Type U | csf2 | NA | (RAMP) | AFE_1039 |
| csf3 | Type U | csf3 | NA | (RAMP) | AFE_1040 |
| csf4 | Type U | csf4 | NA | NA | AFE_1037 |

### IV. Functional Analysis of Candidate Molecules

[0675] Candidate Cas9 molecules, candidate gRNA molecules, candidate Cas9 molecule/gRNA molecule complexes, can be evaluated by art-known methods or as described herein. For example, exemplary methods for evaluating the endonuclease activity of Cas9 molecule have been described previously (Jinek 2012).

[0676] Binding and Cleavage Assay: Testing the Endonuclease Activity of Cas9 Molecule

[0677] The ability of a Cas9 molecule/gRNA molecule complex to bind to and cleave a target nucleic acid can be evaluated in a plasmid cleavage assay. In this assay, synthetic or in vitro-transcribed gRNA molecule is pre-annealed prior to the reaction by heating to 95° C. and slowly cooling down to room temperature. Native or restriction digest-linearized plasmid DNA (300 ng (˜8 nM)) is incubated for 60 min at 37° C. with purified Cas9 protein molecule (50-500 nM) and gRNA (50-500 nM, 1:1) in a Cas9 plasmid cleavage buffer (20 mM HEPES pH 7.5, 150 mM KCl, 0.5 mM DTT, 0.1 mM EDTA) with or without 10 mM MgCl₂. The reactions are stopped with 5×DNA loading buffer (30% glycerol, 1.2% SDS, 250 mM EDTA), resolved by a 0.8 or 1% agarose gel electrophoresis and visualized by ethidium bromide staining. The resulting cleavage products indicate whether the Cas9 molecule cleaves both DNA strands, or only one of the two strands. For example, linear DNA products indicate the cleavage of both DNA strands. Nicked open circular products indicate that only one of the two strands is cleaved.

[0678] Alternatively, the ability of a Cas9 molecule/gRNA molecule complex to bind to and cleave a target nucleic acid can be evaluated in an oligonucleotide DNA cleavage assay. In this assay, DNA oligonucleotides (10 pmol) are radiolabeled by incubating with 5 units T4 polynucleotide kinase and ˜3-6 pmol (˜20-40 mCi) [γ-32P]-ATP in 1× T4 polynucleotide kinase reaction buffer at 37° C. for 30 min, in a 50 μL reaction. After heat inactivation (65° C. for 20 min), reactions are purified through a column to remove unincorporated label. Duplex substrates (100 nM) are generated by annealing labeled oligonucleotides with equimolar amounts of unlabeled complementary oligonucleotide at 95° C. for 3 min, followed by slow cooling to room temperature. For cleavage assays, gRNA molecules are annealed by heating to 95° C. for 30 s, followed by slow cooling to room temperature. Cas9 (500 nM final concentration) is pre-incubated with the annealed gRNA molecules (500 nM) in cleavage assay buffer (20 mM HEPES pH 7.5, 100 mM KCl, 5 mM MgCl2, 1 mM DTT, 5% glycerol) in a total volume of 9 μL. Reactions are initiated by the addition of 1 μl target DNA (10 nM) and incubated for 1 h at 37° C. Reactions are quenched by the addition of 20 μL of loading dye (5 mM EDTA, 0.025% SDS, 5% glycerol in formamide) and heated to 95° C. for 5 min. Cleavage products are resolved on 12% denaturing polyacrylamide gels containing 7 M urea and visualized by phosphorimaging. The resulting cleavage products indicate that whether the complementary strand, the non-complementary strand, or both, are cleaved.

[0679] One or both of these assays can be used to evaluate the suitability of a candidate gRNA molecule or candidate Cas9 molecule.

[0680] Binding Assay: Testing the Binding of Cas9 Molecule to Target DNA

[0681] Exemplary methods for evaluating the binding of Cas9 molecule to target DNA have been described previously (Jinek 2012).

[0682] For example, in an electrophoretic mobility shift assay, target DNA duplexes are formed by mixing of each strand (10 nmol) in deionized water, heating to 95° C. for 3 min and slow cooling to room temperature. All DNAs are purified on 8% native gels containing 1×TBE. DNA bands are visualized by UV shadowing, excised, and eluted by soaking gel pieces in DEPC-treated H2O. Eluted DNA is ethanol precipitated and dissolved in DEPC-treated H2O. DNA samples are 5′ end labeled with [γ-32P]-ATP using T4 polynucleotide kinase for 30 min at 37° C. Polynucleotide kinase is heat denatured at 65° C. for 20 min, and unincorporated radiolabel is removed using a column. Binding assays are performed in buffer containing 20 mM HEPES pH 7.5, 100 mM KCl, 5 mM MgCl₂, 1 mM DTT and 10% glycerol in a total volume of 10 μL. Cas9 protein molecule is programmed with equimolar amounts of pre-annealed gRNA molecule and titrated from 100 pM to 1 μM. Radiolabeled DNA is added to a final concentration of 20 pM. Samples are incubated for 1 h at 37° C. and resolved at 4° C. on an 8% native polyacrylamide gel containing 1×TBE and 5 mM MgCl₂. Gels are dried and DNA visualized by phosphorimaging.

[0683] Differential Scanning Flourimetry (DSF)

[0684] The thermostability of Cas9 molecule-gRNA ribonucleoprotein (RNP) complexes can be measured via DSF. This technique measures the thermostability of a protein, which can increase under favorable conditions such as the addition of a binding RNA molecule, e.g., a gRNA.

[0685] The assay is performed using two different protocols, one to test the best stoichiometric ratio of gRNA:Cas9 protein and another to determine the best solution conditions for RNP formation.

[0686] To determine the best solution to form RNP complexes, a 2 μM solution of Cas9 in water+10×SYPRO Orange® (Life Technologies cat #S-6650) and dispensed into a 384 well plate. An equimolar amount of gRNA diluted in solutions with varied pH and salt is then added. After incubating at room temperature for 10 min. and brief centrifugation to remove any bubbles, a Bio-Rad CFX384™ Real-Time System C1000 Touch™ Thermal Cycler with the Bio-Rad CFX Manager software is used to run a gradient from 20° C. to 90° C. with a 1° C. increase in temperature every 10 seconds.

[0687] The second assay consists of mixing various concentrations of gRNA with 2 μM Cas 9 in optimal buffer from the assay above and incubating at RT for 10 min in a 384 well plate. An equal volume of optimal buffer+10×SYPRO Orange® (Life Technologies cat #S-6650) is added and the plate sealed with Microseal® B adhesive (MSB-1001). Following brief centrifugation to remove any bubbles, a Bio-Rad CFX384™ Real-Time System C1000 Touch™ Thermal Cycler with the Bio-Rad CFX Manager software is used to run a gradient from 20° C. to 90° C. with a 1° C. increase in temperature every 10 seconds.

[0688] Resection Assay: Testing a Cas9 to Promote Resection

[0689] The ability of a Cas9 to promote resection can be evaluated by measuring the levels of single stranded DNA at specific double strand break sites in human cells using quantitative methods (as described in Zhou 2014). In this assay, a cell line is delivered, e.g., by transfection, a candidate Cas9 or a candidate Cas9 fusion protein. The cells are cultured for a sufficient amount of time to allow nuclease activity and resection to occur. Genomic DNA is carefully extracted using a method in which cells are embedded in low-gelling point agar that protects the DNA from shearing and damage during extraction. The genomic DNA is digested with a restriction enzyme that selectively cuts double-stranded DNA. Primers for quantitative PCR that span up to 5 kb of the double strand break site are designed. The results from the PCR reaction show the levels of single strand DNA detected at each of the primer positions. Thus, the length and the level of resection promoted by the candidate Cas9 or Cas9 fusion protein can be determined from this assay.

[0690] Other qualitative assays for identifying the occurrence of resection include the detection of proteins or protein complexes that bind to single-stranded DNA after resection has occurred, e.g., RPA foci, Rad51 foci, or BrDU detection by immunofluorescence. Antibodies for RPA protein and Rad51 are known in the art.

### V. Genome Editing Approaches

[0691] Mutations in a target gene may be corrected using one of the approaches discussed herein. In an embodiment, a mutation in a target gene is corrected by homology directed repair (HDR) using an exogenously provided template nucleic acid (see Section V.1), referred to herein as “gene correction”. In another embodiment, a mutation in a target gene is corrected by homology directed repair without using an exogenously provided template nucleic acid (see Section V.1), referred to herein as gene correction.

[0692] V.1 HDR Repair and Template Nucleic Acids

[0693] In certain embodiments of the methods provided herein, HDR-mediated sequence alteration is used to alter and/or correct (e.g., repair or edit) the sequence of one or more nucleotides in a genome (e.g., a point mutation at E6 of the HBB gene). While not wishing to be bound by theory, it is believed that HDR-mediated alteration of a target sequence within a target gene (e.g., a HBB gene) occurs by HDR with an exogenously provided donor template or template nucleic acid in a process referred to herein as gene correction. For example, the donor template or template nucleic acid provides for alteration of the target sequence. It is contemplated that a plasmid donor can be used as a template for homologous recombination. It is further contemplated that a single stranded donor template can be used as a template for alteration of the target sequence by alternate methods of HDR (e.g., single-strand annealing) between the target sequence and the donor template. Donor template-effected alteration of a target sequence depends on cleavage by a Cas9 molecule. Cleavage by Cas9 can comprise a double-strand break or two single-strand breaks.

[0694] In other embodiments, HDR-mediated sequence alteration is used to alter and/or correct (e.g., repair or edit) the sequence of one or more nucleotides in a target sequence in a genome without the use of an exogenously provided donor template or template nucleic acid. While not wishing to be bound by theory, it is believed that alteration of the target sequence occurs by HDR with endogenous genomic donor sequence, in a process referred to herein as gene conversion. For example, the endogenous genomic donor sequence provides for alteration of the target sequence. It is contemplated that in an embodiment the endogenous genomic donor sequence is located on the same chromosome as the target sequence. It is further contemplated that in another embodiment the endogenous genomic donor sequence is located on a different chromosome from the target sequence. In certain embodiments, the endogenous genomic donor sequence comprises one or more nucleotides derived from the HBD gene. In other embodiments, the endogenous genomic donor sequence comprises one or more nucleotides derived from the SMN2 gene. In certain embodiments, the endogenous genomic donor sequence comprises one or more nucleotides derived from the p47-PHOX pseudogene. Alteration of a target sequence by endogenous genomic donor sequence depends on cleavage by a Cas9 molecule. Cleavage by Cas9 can comprise a double-strand break or two single-strand breaks.

[0695] In an embodiment, the target position or target position regions has at least 50%, 60%, 70%, 80%, 81%, 82%, 83%, 84%, 85%, 86%, 87%, 88%, 89%, 90%, 91%, 92%, 93%, 94%, 95%, 96%, 97%, 98%, or 99% homology with an endogenous homologous sequence.

[0696] In an embodiment, the target position region, except for the target position, differs by 1, 2, 3, 4, 5, 10, 25, 50, 100 or fewer, nucleotides with an endogenous homologous sequence.

[0697] In an embodiment, the target position region has at least 50%, 60%, 70%, 80%, 90%, 92%, 94%, 96%, 98%, or 99% homology with an endogenous homologous sequence over at least 10, 20, 30, 40, 50, 100, 200, 300, 400, 500, 750, 1,000, 2500, 5000, or 10000 nucleotides.

[0698] In an embodiment, the target position region, except for the target position, differs by 1, 2, 3, 4, 5, 10, 25, 50, 100 or fewer, nucleotides with an endogenous homologous sequence over at least 10, 20, 30, 40, 50, 100, 200, 300, 400, 500, 750, 1,000, 2500, 5000, or 10000 nucleotides.

[0699] In an embodiment, the endogenous homologous sequence comprises a domain, e.g., a catalytic domain, a domain that binds a target, a structural domain, found in the gene that comprises the target position.

[0700] In certain embodiments of the methods provided herein, HDR-mediated alteration is used to alter a single nucleotide in a target sequence. These embodiments may utilize either one double-strand break or two single-strand breaks. In certain embodiments, a single nucleotide alteration is incorporated using (1) one double-strand break, (2) two single-strand breaks, (3) two double-strand breaks with a break occurring on each side of the target position, (4) one double-strand break and two single-strand breaks with the double-strand break and two single-strand breaks occurring on each side of the target position (5) four single-strand breaks with a pair of single stranded breaks occurring on each side of the target position, or (6) one single-strand break.

[0701] In certain embodiments wherein a single-stranded template nucleic acid is used, the target position can be altered by alternative HDR.

[0702] Donor template-effected alteration of a target position depends on cleavage by a Cas9 molecule. Cleavage by Cas9 can comprise a nick, a double-strand break, or two single-strand breaks, e.g., one on each strand of the target nucleic acid. After introduction of the breaks on the target nucleic acid, resection occurs at the break ends resulting in single stranded overhanging DNA regions.

[0703] In canonical HDR, a double-stranded donor template is introduced, comprising homologous sequence to the target nucleic acid that will either be directly incorporated into the target nucleic acid or used as a template to change the sequence of the target nucleic acid. After resection at the break, repair can progress by different pathways, e.g., by the double Holliday junction model (or double-strand break repair, DSBR, pathway) or the synthesis-dependent strand annealing (SDSA) pathway. In the double Holliday junction model, strand invasion by the two single stranded overhangs of the target nucleic acid to the homologous sequences in the donor template occurs, resulting in the formation of an intermediate with two Holliday junctions. The junctions migrate as new DNA is synthesized from the ends of the invading strand to fill the gap resulting from the resection. The end of the newly synthesized DNA is ligated to the resected end, and the junctions are resolved, resulting in the alteration of the target nucleic acid, e.g., incorporation of the altered sequence of the donor template at the corresponding target position. Crossover with the donor template may occur upon resolution of the junctions. In the SDSA pathway, only one single stranded overhang invades the donor template and new DNA is synthesized from the end of the invading strand to fill the gap resulting from resection. The newly synthesized DNA then anneals to the remaining single stranded overhang, new DNA is synthesized to fill in the gap, and the strands are ligated to produce the altered DNA duplex.

[0704] In alternative HDR, a single-strand donor template, e.g., template nucleic acid, is introduced. A nick, single-strand break, or double-strand break at the target nucleic acid, for altering a desired target position, is mediated by a Cas9 molecule, e.g., described herein, and resection at the break occurs to reveal single stranded overhangs. Incorporation of the sequence of the template nucleic acid to correct or alter the target position of the target nucleic acid typically occurs by the SDSA pathway, as described above.

[0705] Additional details on template nucleic acids are provided in Section IV entitled “Template nucleic acids” in International Application PCT/US2014/057905, now published as WO2015/048577, the entire contents of which are expressly incorporated herein by reference.

[0706] Mutations in the HBB gene that can be altered (e.g., corrected) by HDR with a template nucleic acid or with endogenous genomic donor sequence include, e.g., point mutation at E6, e.g., E6V.

[0707] In certain embodiments, double-strand cleavage is effected by a Cas9 molecule having cleavage activity associated with an HNH-like domain and cleavage activity associated with a RuvC-like domain, e.g., an N-terminal RuvC-like domain, e.g., a wild type Cas9. Such embodiments require only a single gRNA molecule.

[0708] In certain embodiments, one single-strand break, or nick, is effected by a Cas9 molecule having nickase activity, e.g., a Cas9 nickase as described herein. A nicked target nucleic acid can be a substrate for alt-HDR.

[0709] In other embodiments, two single-strand breaks, or nicks, are effected by a Cas9 molecule having nickase activity, e.g., cleavage activity associated with an HNH-like domain or cleavage activity associated with an N-terminal RuvC-like domain. Such embodiments usually require two gRNAs, one for placement of each single-strand break. In an embodiment, the Cas9 molecule having nickase activity cleaves the strand to which the gRNA hybridizes, but not the strand that is complementary to the strand to which the gRNA hybridizes. In an embodiment, the Cas9 molecule having nickase activity does not cleave the strand to which the gRNA hybridizes, but rather cleaves the strand that is complementary to the strand to which the gRNA hybridizes.

[0710] In certain embodiments, the nickase has HNH activity, e.g., a Cas9 molecule having the RuvC activity inactivated, e.g., a Cas9 molecule having a mutation at D10, e.g., the D10A mutation. D10A inactivates RuvC; therefore, the Cas9 nickase has (only) HNH activity and will cut on the strand to which the gRNA hybridizes (e.g., the complementary strand, which does not have the NGG PAM on it). In other embodiments, a Cas9 molecule having an H840, e.g., an H840A, mutation can be used as a nickase. H840A inactivates HNH; therefore, the Cas9 nickase has (only) RuvC activity and cuts on the non-complementary strand (e.g., the strand that has the NGG PAM and whose sequence is identical to the gRNA). In other embodiments, a Cas9 molecule having an N863 mutation, e.g., the N863A mutation, mutation can be used as a nickase. N863A inactivates HNH therefore the Cas9 nickase has (only) RuvC activity and cuts on the non-complementary strand (the strand that has the NGG PAM and whose sequence is identical to the gRNA).

[0711] In certain embodiments, in which a nickase and two gRNAs are used to position two single-strand nicks, one nick is on the + strand and one nick is on the − strand of the target nucleic acid. The PAMs can be outwardly facing or inwardly facing. The gRNAs can be selected such that the gRNAs are separated by, from about 0-50, 0-100, or 0-200 nucleotides. In an embodiment, there is no overlap between the target sequences that are complementary to the targeting domains of the two gRNAs. In an embodiment, the gRNAs do not overlap and are separated by as much as 50, 100, or 200 nucleotides. In an embodiment, the use of two gRNAs can increase specificity, e.g., by decreasing off-target binding (Ran 2013).

[0712] In certain embodiments, a single nick can be used to induce HDR, e.g., alt-HDR. It is contemplated herein that a single nick can be used to increase the ratio of HR to NHEJ at a given cleavage site. In certain embodiments, a single-strand break is formed in the strand of the target nucleic acid to which the targeting domain of said gRNA is complementary. In certain embodiments, a single-strand break is formed in the strand of the target nucleic acid other than the strand to which the targeting domain of said gRNA is complementary.

[0713] Placement of Double-Strand or Single-Strand Breaks Relative to the Target Position

[0714] A double-strand break or single-strand break in one of the strands should be sufficiently close to target position that an alteration is produced in the desired region, e.g., correction of a mutation occurs. In certain embodiments, the distance is not more than 50, 100, 200, 300, 350 or 400 nucleotides. While not wishing to be bound by theory, in certain embodiments, it is believed that the break should be sufficiently close to target position such that the target position is within the region that is subject to exonuclease-mediated removal during end resection. If the distance between the target position and a break is too great, the sequence desired to be altered may not be included in the end resection and, therefore, may not be altered, as donor sequence, either exogenously provided donor sequence or endogenous genomic donor sequence, in some embodiments is only used to alter sequence within the end resection region.

[0715] In certain embodiments, the gRNA targeting domain is configured such that a cleavage event, e.g., a double-strand or single-strand break, is positioned within 1, 2, 3, 4, 5, 10, 15, 20, 25, 30, 35, 40, 45, 50, 60, 70, 80, 90, 100, 150 or 200 nucleotides of the region desired to be altered, e.g., a mutation. The break, e.g., a double-strand or single-strand break, can be positioned upstream or downstream of the region desired to be altered, e.g., a mutation. In some embodiments, a break is positioned within the region desired to be altered, e.g., within a region defined by at least two mutant nucleotides. In some embodiments, a break is positioned immediately adjacent to the region desired to be altered, e.g., immediately upstream or downstream of a mutation.

[0716] In certain embodiments, a single-strand break is accompanied by an additional single-strand break, positioned by a second gRNA molecule, as discussed below. For example, the targeting domains bind configured such that a cleavage event, e.g., the two single-strand breaks, are positioned within 1, 2, 3, 4, 5, 10, 15, 20, 25, 30, 35, 40, 45, 50, 60, 70, 80, 90, 100, 150 or 200 nucleotides of a target position. In an embodiment, the first and second gRNA molecules are configured such that when guiding a Cas9 nickase, a single-strand break is accompanied by an additional single-strand break, positioned by a second gRNA, sufficiently close to one another to result in alteration of the desired region. In an embodiment, the first and second gRNA molecules are configured such that a single-strand break positioned by said second gRNA is within 10, 20, 30, 40, or 50 nucleotides of the break positioned by said first gRNA molecule, e.g., when the Cas9 is a nickase. In an embodiment, the two gRNA molecules are configured to position cuts at the same position, or within a few nucleotides of one another, on different strands, e.g., essentially mimicking a double-strand break.

[0717] In certain embodiments, in which a gRNA (unimolecular (or chimeric) or modular gRNA) and Cas9 nuclease induce a double-strand break for the purpose of inducing HDR-mediated alteration, the cleavage site is between 0-200 bp (e.g., 0-175, 0 to 150, 0 to 125, 0 to 100, 0 to 75, 0 to 50, 0 to 25, 25 to 200, 25 to 175, 25 to 150, 25 to 125, 25 to 100, 25 to 75, 25 to 50, 50 to 200, 50 to 175, 50 to 150, 50 to 125, 50 to 100, 50 to 75, 75 to 200, 75 to 175, 75 to 150, 75 to 125, 75 to 100 bp) away from the target position. In certain embodiments, the cleavage site is between 0-100 bp (e.g., 0 to 75, 0 to 50, 0 to 25, 25 to 100, 25 to 75, 25 to 50, 50 to 100, 50 to 75 or 75 to 100 bp) away from the target position.

[0718] In certain embodiments, one can promote HDR by using nickases to generate a break with overhangs. While not wishing to be bound by theory, the single stranded nature of the overhangs can enhance the cell's likelihood of repairing the break by HDR as opposed to, e.g., NHEJ. Specifically, in certain embodiments, HDR is promoted by selecting a first gRNA that targets a first nickase to a first target sequence, and a second gRNA that targets a second nickase to a second target sequence which is on the opposite DNA strand from the first target sequence and offset from the first nick.

[0719] In certain embodiment, the targeting domain of a gRNA molecule is configured to position a cleavage event sufficiently far from a preselected nucleotide, e.g., the nucleotide of a coding region, such that the nucleotide is not altered. In certain embodiments, the targeting domain of a gRNA molecule is configured to position an intronic cleavage event sufficiently far from an intron/exon border, or naturally occurring splice signal, to avoid alteration of the exonic sequence or unwanted splicing events. The gRNA molecule may be a first, second, third and/or fourth gRNA molecule, as described herein.

[0720] Placement of a First Break and a Second Break Relative to Each Other

[0721] In certain embodiments, a double-strand break can be accompanied by an additional double-strand break, positioned by a second gRNA molecule, as is discussed below.

[0722] In certain embodiments, a double-strand break can be accompanied by two additional single-strand breaks, positioned by a second gRNA molecule and a third gRNA molecule.

[0723] In certain embodiments, a first and second single-strand breaks can be accompanied by two additional single-strand breaks positioned by a third gRNA molecule and a fourth gRNA molecule.

[0724] When two or more gRNAs are used to position two or more cleavage events, e.g., double-strand or single-strand breaks, in a target nucleic acid, it is contemplated that the two or more cleavage events may be made by the same or different Cas9 proteins. For example, when two gRNAs are used to position two double stranded breaks, a single Cas9 nuclease may be used to create both double stranded breaks. When two or more gRNAs are used to position two or more single stranded breaks (nicks), a single Cas9 nickase may be used to create the two or more nicks. When two or more gRNAs are used to position at least one double stranded break and at least one single stranded break, two Cas9 proteins may be used, e.g., one Cas9 nuclease and one Cas9 nickase. It is contemplated that when two or more Cas9 proteins are used that the two or more Cas9 proteins may be delivered sequentially to control specificity of a double stranded versus a single stranded break at the desired position in the target nucleic acid.

[0725] In some embodiments, the targeting domain of the first gRNA molecule and the targeting domain of the second gRNA molecules are complementary to opposite strands of the target nucleic acid molecule. In some embodiments, the gRNA molecule and the second gRNA molecule are configured such that the PAMs are oriented outward. In some embodiments, the gRNA molecule and the second gRNA molecule are configured such that the PAMs are oriented inward.

[0726] In certain embodiments, two gRNA are selected to direct Cas9-mediated cleavage at two positions that are a preselected distance from each other. In certain embodiments, the two points of cleavage are on opposite strands of the target nucleic acid. In some embodiments, the two cleavage points form a blunt ended break, and in other embodiments, they are offset so that the DNA ends comprise one or two overhangs (e.g., one or more 5′ overhangs and/or one or more 3′ overhangs). In some embodiments, each cleavage event is a nick. In some embodiments, the nicks are close enough together that they form a break that is recognized by the double stranded break machinery (as opposed to being recognized by, e.g., the SSBr machinery). In certain embodiments, the nicks are far enough apart that they create an overhang that is a substrate for HDR, i.e., the placement of the breaks mimics a DNA substrate that has experienced some resection. For instance, in some embodiments the nicks are spaced to create an overhang that is a substrate for processive resection. In some embodiments, the two breaks are spaced within 25-65 nucleotides of each other. The two breaks may be, e.g., about 25, 30, 35, 40, 45, 50, 55, 60 or 65 nucleotides of each other. The two breaks may be, e.g., at least about 25, 30, 35, 40, 45, 50, 55, 60 or 65 nucleotides of each other. The two breaks may be, e.g., at most about 30, 35, 40, 45, 50, 55, 60 or 65 nucleotides of each other. In embodiments, the two breaks are about 25-30, 30-35, 35-40, 40-45, 45-50, 50-55, 55-60, or 60-65 nucleotides of each other.

[0727] In some embodiments, the break that mimics a resected break comprises a 3′ overhang (e.g., generated by a DSB and a nick, where the nick leaves a 3′ overhang), a 5′ overhang (e.g., generated by a DSB and a nick, where the nick leaves a 5′ overhang), a 3′ and a 5′ overhang (e.g., generated by three cuts), two 3′ overhangs (e.g., generated by two nicks that are offset from each other), or two 5′ overhangs (e.g., generated by two nicks that are offset from each other).

[0728] In certain embodiments, in which two gRNAs (independently, unimolecular (or chimeric) or modular gRNA) complexing with Cas9 nickases induce two single-strand breaks for the purpose of inducing HDR-mediated alteration (e.g., correction), the closer nick is between 0-200 bp (e.g., 0-175, 0 to 150, 0 to 125, 0 to 100, 0 to 75, 0 to 50, 0 to 25, 25 to 200, 25 to 175, 25 to 150, 25 to 125, 25 to 100, 25 to 75, 25 to 50, 50 to 200, 50 to 175, 50 to 150, 50 to 125, 50 to 100, 50 to 75, 75 to 200, 75 to 175, 75 to 150, 75 to 125, or 75 to 100 bp) away from the target position and the two nicks will ideally be within 25-65 bp of each other (e.g., 25 to 50, 25 to 45, 25 to 40, 25 to 35, 25 to 30, 30 to 55, 30 to 50, 30 to 45, 30 to 40, 30 to 35, 35 to 55, 35 to 50, 35 to 45, 35 to 40, 40 to 55, 40 to 50, 40 to 45 bp, 45 to 50 bp, 50 to 55 bp, 55 to 60 bp, or 60 to 65 bp) and no more than 100 bp away from each other (e.g., no more than 90, 80, 70, 60, 50, 40, 30, 20, 10, or 5 bp away from each other). In certain embodiments, the cleavage site is between 0-100 bp (e.g., 0 to 75, 0 to 50, 0 to 25, 25 to 100, 25 to 75, 25 to 50, 50 to 100, 50 to 75, or 75 to 100 bp) away from the target position.

[0729] In some embodiments, two gRNAs, e.g., independently, unimolecular (or chimeric) or modular gRNA, are configured to position a double-strand break on both sides of a target position. In other embodiments, three gRNAs, e.g., independently, unimolecular (or chimeric) or modular gRNA, are configured to position a double-strand break (i.e., one gRNA complexes with a cas9 nuclease) and two single-strand breaks or paired single stranded breaks (i.e., two gRNAs complex with Cas9 nickases) on either side of the target position. In other embodiments, four gRNAs, e.g., independently, unimolecular (or chimeric) or modular gRNA, are configured to generate two pairs of single stranded breaks (i.e., two pairs of two gRNA molecules complex with Cas9 nickases) on either side of the target position. The double-strand break(s) or the closer of the two single-strand nicks in a pair will ideally be within 0-500 bp of the target position (e.g., no more than 450, 400, 350, 300, 250, 200, 150, 100, 50 or 25 bp from the target position). When nickases are used, the two nicks in a pair are, in certain embodiments, within 25-65 bp of each other (e.g., between 25 to 55, 25 to 50, 25 to 45, 25 to 40, 25 to 35, 25 to 30, 50 to 55, 45 to 55, 40 to 55, 35 to 55, 30 to 55, 30 to 50, 35 to 50, 40 to 50, 45 to 50, 35 to 45, 40 to 45 bp, 45 to 50 bp, 50 to 55 bp, 55 to 60 bp, or 60 to 65 bp) and no more than 100 bp away from each other (e.g., no more than 90, 80, 70, 60, 50, 40, 30, 20, or 10 bp).

[0730] When two gRNAs are used to target Cas9 molecules to breaks, different combinations of Cas9 molecules are envisioned. In some embodiments, a first gRNA is used to target a first Cas9 molecule to a first target position, and a second gRNA is used to target a second Cas9 molecule to a second target position. In some embodiments, the first Cas9 molecule creates a nick on the first strand of the target nucleic acid, and the second Cas9 molecule creates a nick on the opposite strand, resulting in a double stranded break (e.g., a blunt ended cut or a cut with overhangs).

[0731] Different combinations of nickases can be chosen to target one single stranded break to one strand and a second single stranded break to the opposite strand. When choosing a combination, one can take into account that there are nickases having one active RuvC-like domain, and nickases having one active HNH domain. In certain embodiments, a RuvC-like domain cleaves the non-complementary strand of the target nucleic acid molecule. In certain embodiments, an HNH-like domain cleaves a single stranded complementary domain, e.g., a complementary strand of a double stranded nucleic acid molecule. Generally, if both Cas9 molecules have the same active domain (e.g., both have an active RuvC domain or both have an active HNH domain), one will choose two gRNAs that bind to opposite strands of the target. In more detail, in some embodiments, a first gRNA is complementary with a first strand of the target nucleic acid and binds a nickase having an active RuvC-like domain and causes that nickase to cleave the strand that is non-complementary to that first gRNA, i.e., a second strand of the target nucleic acid; and a second gRNA is complementary with a second strand of the target nucleic acid and binds a nickase having an active RuvC-like domain and causes that nickase to cleave the strand that is non-complementary to that second gRNA, i.e., the first strand of the target nucleic acid. Conversely, In some embodiments, a first gRNA is complementary with a first strand of the target nucleic acid and binds a nickase having an active HNH domain and causes that nickase to cleave the strand that is complementary to that first gRNA, i.e., a first strand of the target nucleic acid; and a second gRNA is complementary with a second strand of the target nucleic acid and binds a nickase having an active HNH domain and causes that nickase to cleave the strand that is complementary to that second gRNA, i.e., the second strand of the target nucleic acid. In another arrangement, if one Cas9 molecule has an active RuvC-like domain and the other Cas9 molecule has an active HNH domain, the gRNAs for both Cas9 molecules can be complementary to the same strand of the target nucleic acid, so that the Cas9 molecule with the active RuvC-like domain will cleave the non-complementary strand and the Cas9 molecule with the HNH domain will cleave the complementary strand, resulting in a double stranded break.

[0732] In an embodiment, the cleavage event comprises one or more breaks, e.g., one or more single-strand breaks, one or more double-strand breaks, or a combination thereof.

[0733] In an embodiment, the cleavage event comprises any one of the following: (a) one single-strand break; (b) two single-strand breaks; (c) three single-strand breaks; (d) four single-strand breaks; (e) one double-strand break; (f) two double-strand breaks; (g) one single-strand break and one double-strand break; (h) two single-strand breaks and one double-strand break; or (i) any combination thereof.

[0734] In an embodiment, the gRNA molecule and the second gRNA molecule position a cleavage event on each strand of a target nucleic acid.

[0735] In an embodiment, the cleavage event flanks the target position, and wherein the terminus (created by the cleavage event) closest to the target position, for each cleavage event, is a 5′ terminus, e.g., resulting in a 5′ overhang.

[0736] While not wishing to be bound by theory, it believed that, in an embodiment, the sequence exposed by a cleavage event (e.g., a single-strand cleavage event) mediated by a gRNA molecule and a Cas9 molecule (e.g., a Cas9 nickase, e.g., a Cas9 molecule containing D10A or N863A mutation) may affect (e.g., increase or decrease) gene conversion efficiency. For example, the sequence exposed by the cleavage event can include a 5′ overhang, a 3′ overhang, a product of the nucleolytic processing of a 5′ overhang, a product of the nucleolytic processing of a 3′ overhang, or any combination thereof. In an embodiment, the exposed sequence comprises or consists of a 5′ overhang. In another embodiment, the exposed sequence comprises or consists of a 3′ overhang. In an embodiment, the exposed sequence comprises or consists of a product of the nucleolytic processing of a 5′ overhang. In another embodiment, the exposed sequence comprises or consists of a product of the nucleolytic processing of a 3′ overhang. In an embodiment, the 5′ overhang is between 1 and 20000 nucleotides, 5 and 20000 nucleotides, 10 and 20000 nucleotides, 20 and 20000 nucleotides, 30 and 20000 nucleotides, between 35 and 20000 nucleotides, between 40 and 20000 nucleotides, between 50 and 20000 nucleotides, between 1000 and 10000 nucleotides, or between 500 and 5000 nucleotides in length, e.g., between 1 and 100 nucleotides, between 1 and 50 nucleotides, between 1 and 25 nucleotides, between 40 and 60 nucleotides, between 40 and 55 nucleotides, or between 45 and 50 nucleotides in length, e.g., at least about 1, 5, 10, 20, 30, 35, 40, 45, 50, 75, 100, 200, 300, 400, 500, 750, 1000, 2000, 3000, 4000, 5000, 6000, 7000, 8000, 9000, 10000, or 15000 nucleotides in length. The sequence exposed by the Cas9 molecule/gRNA molecule mediated cleavage event can constitute a substrate used for homology search in gene conversion.

[0737] By way of example, when a pair of gRNA molecules targets a Cas9 nickase to mediate a cleavage event at a HBB locus, the sequence exposed by said cleavage event can probe any genomic locus for possible homology. While not to be bound by theory, it is believed that, in an embodiment, higher sequence identity of the exposed HBB region with a genomic region can promote gene conversion more effectively. For example, the HBD gene has approximately 92% sequence homology with the HBB gene, therefore the HBD gene may be used as a donor template for effective gene conversion. If the exposed sequence contains a mutation with respect to the HBD sequence, the mutation may decrease gene conversion efficiency. Therefore, different gRNA molecules may give rise to exposed sequences having different homologies to a donor template.

[0738] In an embodiment, the exposed sequence differs by 1, 2, 3, 4, 5, 10, 25, 50, 100 or fewer, nucleotides with an endogenous homologous sequence. In an embodiment, the exposed sequence has at least 50%, 60%, 70%, 80%, 81%, 82%, 83%, 84%, 85%, 86%, 87%, 88%, 89%, 90%, 91%, 92%, 93%, 94%, 95%, 96%, 97%, 98%, or 99% homology with an endogenous homologous sequence over at least 10, 20, 30, 40, 50, 100, 200, 300, 400, 500, 750, 1000, 2500, 5000, or 10000 nucleotides. In an embodiment, the exposed sequence differs by 1, 2, 3, 4, 5, 10, 25, 50, 100 or fewer, nucleotides with an endogenous homologous sequence over at least 10, 20, 30, 40, 50, 100, 200, 300, 400, 500, 750, 1000, 2500, 5000, or 10000 nucleotides.

[0739] In an embodiment, the cleavage event flanks the target position, and the terminus (created by a cleavage event) closest to the target position, for each cleavage event, is a 3′ terminus, e.g., resulting a 3′ overhang.

[0740] In an embodiment, the 3′ overhang is between 1 and 20000 nucleotides, 5 and 20000 nucleotides, 10 and 20000 nucleotides, 20 and 20000 nucleotides, between 30 and 20000 nucleotides, between 35 and 20000 nucleotides, between 40 and 20000 nucleotides, between 50 and 20000 nucleotides, between 1000 and 10000 nucleotides, or between 500 and 5000 nucleotides in length, e.g., between 1 and 100 nucleotides, between 1 and 50 nucleotides, between 1 and 25 nucleotides, between 40 and 60 nucleotides, between 40 and 55 nucleotides, or between 45 and 50 nucleotides in length, e.g., at least about 30, 35, 40, 45, 50, 75, 100, 200, 300, 400, 500, 750, 1000, 2000, 3000, 4000, 5000, 6000, 7000, 8000, 9000, 10000, or 15000 nucleotides in length.

[0741] In an embodiment, the distance between the cleavage event and the target position is between 10 and 10000 nucleotides in length, e.g., between 50 and 5000 nucleotides, between 100 and 1000 nucleotides, between 200 and 800 nucleotides, between 400 and 600 nucleotides, between 100 and 500 nucleotides, or between 500 and 1000 nucleotides in length, e.g., at least about 20, 30, 40, 50, 75, 100, 200, 300, 400, 500, 750, 1000, 2000, 3000, 4000, 5000, 6000, 7000, 8000, 9000, or 10000 nucleotides in length.

[0742] In an embodiment, the cleavage event comprises a single-strand break, and wherein the distance between the single-strand break and the target position is between 10 and 10000 nucleotides in length, e.g., between 50 and 5000 nucleotides, between 100 and 1000 nucleotides, between 200 and 800 nucleotides, between 400 and 600 nucleotides, between 100 and 500 nucleotides, or between 500 and 1000 nucleotides in length, e.g., at least about 20, 30, 40, 50, 75, 100, 200, 300, 400, 500, 750, 1000, 2000, 3000, 4000, 5000, 6000, 7000, 8000, 9000, or 10000 nucleotides in length.

[0743] In an embodiment, the cleavage event comprises two, three or four single-strand breaks, and wherein the distance between each of the single-strand breaks and the target position is between 10 and 10000 nucleotides in length, e.g., between 50 and 5000 nucleotides, between 100 and 1000 nucleotides, between 200 and 800 nucleotides, between 400 and 600 nucleotides, between 100 and 500 nucleotides, or between 500 and 1000 nucleotides in length, e.g., at least about 20, 30, 40, 50, 75, 100, 200, 300, 400, 500, 750, 1000, 2000, 3000, 4000, 5000, 6000, 7000, 8000, 9000, or 10000 nucleotides in length.

[0744] In an embodiment, the cleavage event comprises a double-strand break, and wherein the distance between the double-strand break and the target position is between 10 and 10000 nucleotides in length, e.g., between 50 and 5000 nucleotides, between 100 and 1000 nucleotides, between 200 and 800 nucleotides, between 400 and 600 nucleotides, between 100 and 500 nucleotides, or between 500 and 1000 nucleotides in length, e.g., at least about 20, 30, 40, 50, 75, 100, 200, 300, 400, 500, 750, 1000, 2000, 3000, 4000, 5000, 6000, 7000, 8000, 9000, or 10000 nucleotides in length.

[0745] In an embodiment, the cleavage event comprises two double-strand breaks, and wherein the distance between each of the double-strand breaks and the target position is between 10 and 10000 nucleotides in length, e.g., between 50 and 5000 nucleotides, between 100 and 1000 nucleotides, between 200 and 800 nucleotides, between 400 and 600 nucleotides, between 100 and 500 nucleotides, or between 500 and 1000 nucleotides in length, e.g., at least about 20, 30, 40, 50, 75, 100, 200, 300, 400, 500, 750, 1000, 2000, 3000, 4000, 5000, 6000, 7000, 8000, 9000, or 10000 nucleotides in length.

[0746] In an embodiment, the cleavage event comprises a single-strand break and a double-strand break, wherein the distance between the single-strand break and the target position is between 10 and 10000 nucleotides in length, e.g., between 50 and 5000 nucleotides or between 100 and 1000 nucleotides in length, e.g., about 20, 30, 40, 50, 75, 100, 200, 300, 400, 500, 750, 1000, 2000, 3000, 4000, 5000, 6000, 7000, 8000, 9000, or 10000 nucleotides in length, and wherein the distance between the double-strand break and the target position is between 10 and 10000 nucleotides in length, e.g., between 50 and 5000 nucleotides or between 100 and 1000 nucleotides in length, e.g., at least about 20, 30, 40, 50, 75, 100, 200, 300, 400, 500, 750, 1000, 2000, 3000, 4000, 5000, 6000, 7000, 8000, 9000, or 10000 nucleotides in length.

[0747] In an embodiment, the cleavage event comprises two single-strand breaks and a double-strand break,

[0748] wherein the distance between each of the single-strand breaks and the target position is between 10 and 10000 nucleotides in length, e.g., between 50 and 5000 nucleotides or between 100 and 1000 nucleotides in length, e.g., about 20, 30, 40, 50, 75, 100, 200, 300, 400, 500, 750, 1000, 2000, 3000, 4000, 5000, 6000, 7000, 8000, 9000, or 10000 nucleotides in length, and

[0749] wherein the distance between the double-strand break and the target position is between 10 and 10000 nucleotides in length, e.g., between 50 and 5000 nucleotides or between 100 and 1000 nucleotides in length, e.g., at least about 20, 30, 40, 50, 75, 100, 200, 300, 400, 500, 750, 1000, 2000, 3000, 4000, 5000, 6000, 7000, 8000, 9000, or 10000 nucleotides in length.

[0750] In an embodiment, the cleavage event comprises two or more single-strand breaks, two or more double-strand breaks, or two single-strand breaks and one double-strand breaks,

[0751] wherein the distance between any of the two breaks that are present on the same strand is between 30 and 20000 nucleotides, 40 and 20000 nucleotides, or 50 and 20000 nucleotides in length, e.g., between 1000 and 10000 nucleotides or between 500 and 5000 nucleotides in length, e.g., between 40 and 60 nucleotides, between 40 and 55 nucleotides, or between 45 and 50 nucleotides in length, e.g., at least about 30, 35, 40, 45, 50, 75, 100, 200, 300, 400, 500, 750, 1000, 2000, 3000, 4000, 5000, 6000, 7000, 8000, 9000, 10000, or 15000 nucleotides in length.

[0752] In an embodiment, the cleavage event comprises two or more single-strand breaks, two or more double-strand breaks, or two single-strand breaks and one double-strand breaks,

[0753] wherein the distance between at least two breaks that are present on different strands is between 30 and 20000 nucleotides, 40 and 20000 nucleotides, or 50 and 20000 nucleotides in length, e.g., between 1000 and 10000 nucleotides or between 500 and 5000 nucleotides in length, e.g., between 40 and 60 nucleotides, between 40 and 55 nucleotides, or between 45 and 50 nucleotides in length, e.g., at least about 30, 35, 40, 45, 50, 75, 100, 200, 300, 400, 500, 750, 1000, 2000, 3000, 4000, 5000, 6000, 7000, 8000, 9000, 10000, or 15000 nucleotides in length.

[0754] In an embodiment, the cleavage event comprises two single-strand breaks, wherein the distance between the two single breaks is between 30 and 20000 nucleotides, 40 and 20000 nucleotides, or 50 and 20000 nucleotides in length, e.g., between 1000 and 10000 nucleotides or between 500 and 5000 nucleotides in length, e.g., between 40 and 60 nucleotides, between 40 and 55 nucleotides, or between 45 and 50 nucleotides in length, e.g., at least about 30, 35, 40, 45, 50, 75, 100, 200, 300, 400, 500, 750, 1000, 2000, 3000, 4000, 5000, 6000, 7000, 8000, 9000, 10000, or 15000 nucleotides in length. In an embodiment, the single-strand breaks are present on different strands. In another embodiment, the single-strand breaks are present on the same strand. In an embodiment, the cleavage event further comprises one or more (e.g., two) of single-strand break, double-strand break, or both.

[0755] In an embodiment, the Cas9 molecule comprises HNH-like domain cleavage activity but has no, or no significant, N-terminal RuvC-like domain cleavage activity. In an embodiment, the eaCas9 molecule is an HNH-like domain nickase, e.g., the Cas9 molecule comprises a mutation at D10, e.g., D10A. In another embodiment, the eaCas9 molecule comprises N-terminal RuvC-like domain cleavage activity but has no, or no significant, HNH-like domain cleavage activity.

[0756] In an embodiment, the Cas9 molecule is an N-terminal RuvC-like domain nickase, e.g., the eaCas9 molecule comprises a mutation at N863, e.g., N863A.

[0757] In an embodiment, the first gRNA molecule positions a cleavage event on a strand that does not bind to the first gRNA molecule.

[0758] In an embodiment, the second gRNA molecule positions a cleavage event on a strand that does not bind to the second gRNA molecule.

[0759] In an embodiment, the first gRNA molecule positions a cleavage event on a strand that does not bind to the first gRNA and the second gRNA molecule positions a cleavage event on a strand that does not bind to the second gRNA molecule, and wherein the gRNA molecule and the second gRNA molecule bind to different strands, e.g., resulting in a 3′ overhang on each strand.

[0760] In an embodiment, the first gRNA molecule positions a cleavage event 5′ to the target position on the first strand. In an embodiment, the first gRNA molecule positions a cleavage event 5′ to the target position on the first strand, as shown in the diagram below:

[chemical structure]

[0761] wherein X is the cleavage event and M is the target position.

[0762] In an embodiment, the second gRNA molecule positions a cleavage event 3′ to the target position (relative to the target position on the first strand) on the second strand. In an embodiment, the second gRNA molecule positions a cleavage event 3′ to the target position (relative to the target position on the first strand) on the second strand, as shown in the diagram below:

[chemical structure]

[0763] wherein X is the cleavage event and M is the target position.

[0764] In an embodiment, the second gRNA molecule positions a cleavage event 5′ to the target position on the second strand. In an embodiment, the second gRNA molecule positions a cleavage event 5′ to the target position on the second strand, as shown in the diagram below:

[chemical structure]

[0765] wherein X is the cleavage event and M is the target position.

[0766] In an embodiment, the first gRNA molecule positions a cleavage event 5′ to the target position on the first strand, and wherein the second gRNA molecule positions a cleavage event 3′ to the target position (relative to the target position on the first strand) on the second strand. In an embodiment, the first gRNA molecule positions a cleavage event 5′ to the target position on the first strand, and wherein the second gRNA molecule positions a cleavage event 3′ to the target position (relative to the target position on the first strand) on the second strand, as shown in the diagram below:

[chemical structure]

[0767] wherein X is the cleavage event and M is the target position.

[0768] In an embodiment, the first gRNA molecule positions a cleavage event 3′ to the target position on the first strand. In an embodiment, the first gRNA molecule positions a cleavage event 3′ to the target position on the first strand, as shown in the diagram below:

[chemical structure]

[0769] wherein X is the cleavage event and M is the target position.

[0770] In an embodiment, the second gRNA molecule positions a cleavage event 5′ to the target position (relative to the target position on the first strand) on the second strand. In an embodiment, the second gRNA molecule positions a cleavage event 5′ to the target position (relative to the target position on the first strand) on the second strand, as shown in the diagram below:

[chemical structure]

[0771] wherein X is the cleavage event and M is the target position.

[0772] In an embodiment, the first gRNA molecule positions a cleavage event 3′ to the target position on the first strand, and wherein the second gRNA molecule positions a cleavage event 5′ to the target position (relative to the target position on the first strand) on the second strand. In an embodiment, the first gRNA molecule positions a cleavage event 3′ to the target position on the first strand, and wherein the second gRNA molecule positions a cleavage event 5′ to the target position (relative to the target position on the first strand) on the second strand, as shown in the diagram below:

[chemical structure]

[0773] wherein X is the cleavage event and M is the target position.

[0774] In an embodiment, the first gRNA molecule positions a cleavage event 5′ to the target position on the first strand, and wherein the second gRNA molecule positions a cleavage event 5′ to the target position (relative to the target position on the first strand) on the second strand, e.g., to produce a 5′ overhang. In an embodiment, the first gRNA molecule positions a cleavage event 5′ to the target position on the first strand, and wherein the second gRNA molecule positions a cleavage event 5′ to the target position (relative to the target position on the first strand) on the second strand, e.g., to produce a 5′ overhang, as shown in the diagram below:

[chemical structure]

[0775] wherein X is the cleavage event and M is the target position.

[0776] In an embodiment, the first gRNA molecule positions a cleavage event 3′ to the target position on the first strand, and wherein the second gRNA molecule positions a cleavage event 3′ to the target position (relative to the target position on the first strand) on the second strand, e.g., to produce a 5′ overhang. In an embodiment, the first gRNA molecule positions a cleavage event 3′ to the target position on the first strand, and wherein the second gRNA molecule positions a cleavage event 3′ to the target position (relative to the target position on the first strand) on the second strand, e.g., to produce a 5′ overhang, as shown in the diagram below:

[chemical structure]

[0777] wherein X is the cleavage event and M is the target position.

[0778] In an embodiment, the first gRNA molecule positions a cleavage event 5′ to the target position on the first strand, and wherein the second gRNA molecule positions a cleavage event 5′ to the target position (relative to the target position on the first strand) on the second strand, e.g., to produce a 3′ overhang. In an embodiment, the first gRNA molecule positions a cleavage event 5′ to the target position on the first strand, and wherein the second gRNA molecule positions a cleavage event 5′ to the target position (relative to the target position on the first strand) on the second strand, e.g., to produce a 3′ overhang, as shown in the diagram below:

[chemical structure]

[0779] wherein X is the cleavage event and M is the target position.

[0780] In an embodiment, the first gRNA molecule positions a cleavage event 3′ to the target position on the first strand, and wherein the second gRNA molecule positions a cleavage event 3′ to the target position (relative to the target position on the first strand) on the second strand, e.g., to produce a 3′ overhang. In an embodiment, the first gRNA molecule positions a cleavage event 3′ to the target position on the first strand, and wherein the second gRNA molecule positions a cleavage event 3′ to the target position (relative to the target position on the first strand) on the second strand, e.g., to produce a 3′ overhang, as shown in the diagram below:

[chemical structure]

[0781] wherein X is the cleavage event and M is the target position.

[0782] In one embodiment, the target position comprises a mutation. In one embodiment, the mutation is associated with a disease phenotype.

[0783] In an embodiment, the first gRNA molecule positions a cleavage event on a strand that binds to the gRNA molecule.

[0784] In an embodiment, the second gRNA molecule positions a cleavage event on a strand that binds to the second gRNA molecule.

[0785] In an embodiment, the first gRNA molecule positions a cleavage event on a strand that binds to the gRNA and the second gRNA molecule positions a cleavage event on a strand that binds to the second gRNA molecule, and wherein the first gRNA molecule and the second gRNA molecule bind to different strands, e.g., resulting in a 5′ overhang on each strand.

[0786] In an embodiment, the gRNA molecule, together with the Cas9 molecule (e.g., a nickase), positions a cleavage event on a strand (e.g., a first strand or a second strand),

[0787] In an embodiment, the gRNA molecule positions a cleavage event 5′ to the target position on the first strand. This embodiment allows the use of a single Cas9 molecule, e.g., a single Cas9 molecule that is a nickase (e.g., a Cas9 molecule with a D10A mutation), e.g., to place a single-strand cleavage event sufficiently close to the target position (e.g., within 10000, 9000, 8000, 7000, 6000, 5000, 4000, 3000, 2000, 1000, 800, 600, 500, 400, 300, 200, 100, 75, 50, 40, 30, 20, 10, 5, or 1 bp to the target position). For example, this embodiment can be illustrated as shown in the diagram below:

[chemical structure]

[0788] wherein X is the cleavage event, M is the target position.

[0789] In an embodiment, the gRNA molecule positions a cleavage event 3′ to the target position (relative to the target position on the first strand) on the second strand. This embodiment allows the use of a single Cas9 molecule, e.g., a single Cas9 molecule that is a nickase (e.g., a Cas9 molecule with a D10A mutation), e.g., to place a single-strand cleavage event sufficiently close to the target position (e.g., within 10000, 9000, 8000, 7000, 6000, 5000, 4000, 3000, 2000, 1000, 800, 600, 500, 400, 300, 200, 100, 75, 50, 40, 30, 20, 10, 5, or 1 bp to the target position). For example, this embodiment can be illustrated as shown in the diagram below:

[chemical structure]

[0790] wherein X is the cleavage event, M is the target position.

[0791] In an embodiment, the gRNA molecule positions a cleavage event 3′ to the target position on the first strand. This embodiment allows the use of a single Cas9 molecule, e.g., a single Cas9 molecule that is a nickase (e.g., a Cas9 molecule with a D10A mutation), e.g., to place a single-strand cleavage event sufficiently close to the target position (e.g., within 10000, 9000, 8000, 7000, 6000, 5000, 4000, 3000, 2000, 1000, 800, 600, 500, 400, 300, 200, 100, 75, 50, 40, 30, 20, 10, 5, or 1 bp to the target position). For example, this embodiment can be illustrated as shown in the diagram below:

[chemical structure]

[0792] wherein X is the cleavage event, M is the target position.

[0793] In an embodiment, the gRNA molecule positions a cleavage event 5′ to the target position (relative to the target position on the first strand) on the second strand. This embodiment allows the use of a single Cas9 molecule, e.g., a single Cas9 molecule that is a nickase (e.g., a Cas9 molecule with a D10A mutation), e.g., to place a single-strand cleavage event sufficiently close to the target position (e.g., within 10000, 9000, 8000, 7000, 6000, 5000, 4000, 3000, 2000, 1000, 800, 600, 500, 400, 300, 200, 100, 75, 50, 40, 30, 20, 10, 5, or 1 bp to the target position). For example, this embodiment can be illustrated as shown in the diagram below:

[chemical structure]

[0794] wherein X is the cleavage event, M is the target position.

[0795] In an embodiment, the gRNA molecule positions a cleavage event 5′ to the target position on the first strand. This embodiment allows the use of a single Cas9 molecule, e.g., a single Cas9 molecule that is a nickase (e.g., a Cas9 molecule with an N863A mutation), e.g., to place a single-strand cleavage event sufficiently close to the target position (e.g., within 10000, 9000, 8000, 7000, 6000, 5000, 4000, 3000, 2000, 1000, 800, 600, 500, 400, 300, 200, 100, 75, 50, 40, 30, 20, 10, 5, or 1 bp to the target position). For example, this embodiment can be illustrated as shown in the diagram below:

[chemical structure]

[0796] wherein X is the cleavage event, M is the target position.

[0797] In an embodiment, the gRNA molecule positions a cleavage event 3′ to the target position (relative to the target position on the first strand) on the second strand. This embodiment allows the use of a single Cas9 molecule, e.g., a single Cas9 molecule that is a nickase (e.g., a Cas9 molecule with an N863A mutation), e.g., to place a single-strand cleavage event sufficiently close to the target position (e.g., within 10000, 9000, 8000, 7000, 6000, 5000, 4000, 3000, 2000, 1000, 800, 600, 500, 400, 300, 200, 100, 75, 50, 40, 30, 20, 10, 5, or 1 bp to the target position). For example, this embodiment can be illustrated as shown in the diagram below:

[chemical structure]

[0798] wherein X is the cleavage event, M is the target position.

[0799] In an embodiment, the gRNA molecule positions a cleavage event 3′ to the target position on the first strand. This embodiment allows the use of a single Cas9 molecule, e.g., a single Cas9 molecule that is a nickase (e.g., a Cas9 molecule with an N863A mutation), e.g., to place a single-strand cleavage event sufficiently close to the target position (e.g., within 10000, 9000, 8000, 7000, 6000, 5000, 4000, 3000, 2000, 1000, 800, 600, 500, 400, 300, 200, 100, 75, 50, 40, 30, 20, 10, 5, or 1 bp to the target position). For example, this embodiment can be illustrated as shown in the diagram below:

[chemical structure]

[0800] wherein X is the cleavage event, M is the target position.

[0801] In an embodiment, the gRNA molecule positions a cleavage event 5′ to the target position (relative to the target position on the first strand) on the second strand. This embodiment allows the use of a single Cas9 molecule, e.g., a single Cas9 molecule that is a nickase (e.g., a Cas9 molecule with an N863A mutation), e.g., to place a single-strand cleavage event sufficiently close to the target position (e.g., within 10000, 9000, 8000, 7000, 6000, 5000, 4000, 3000, 2000, 1000, 800, 600, 500, 400, 300, 200, 100, 75, 50, 40, 30, 20, 10, 5, or 1 bp to the target position). For example, this embodiment can be illustrated as shown in the diagram below:

[chemical structure]

[0802] wherein X is the cleavage event, M is the target position.

[0803] In an embodiment the gRNA molecule, together with the Cas9 molecule (e.g., a nickase), positions a cleavage event on the strand that binds to the gRNA molecule; and the second gRNA molecule, together with the Cas9 molecule, positions a cleavage event on the strand that binds to the second gRNA molecule, wherein the gRNA molecule and the second gRNA molecule bind to different strands, the gRNA molecule positions a cleavage event 5′ to the target position on the first strand, and the second gRNA molecule positions a cleavage event 3′ to the target position (relative to the target position on the first strand) on the second strand. This embodiment allows the use of a single Cas9 molecule, e.g., a single Cas9 molecule that is a nickase (e.g., a Cas9 molecule with a D10A mutation), e.g., to place single-strand cleavage events on each side of the target position.

[0804] For example, this embodiment can be illustrated as shown in the diagram below:

[chemical structure]

[0805] wherein X is the cleavage event, M is the target position.

[0806] In an embodiment, the cleavage event positioned by the gRNA molecule and the cleavage event positioned by the second gRNA molecule are separated by 10 to 10000, 10 to 5000, 10 to 2500, 10 to 1000, 10 to 750, 10 to 500, 10 to 400, 10 to 300, 10 to 200, 10 to 100, 10 to 75, 10 to 50, or 10 to 25 base pairs.

[0807] In an embodiment:

[0808] the gRNA molecule, together with the Cas9 molecule (a nickase), positions a cleavage event on the strand other than the strand that binds to the gRNA molecule; and

[0809] the second gRNA molecule, together with the Cas9 molecule, positions a cleavage event on the strand other than the strand that binds to the second gRNA molecule, wherein:

[0810] the gRNA molecule and the second gRNA molecule bind to different strands,

[0811] the gRNA molecule positions a cleavage event 5′ to the target position on the first strand, and

[0812] the second gRNA molecule positions a cleavage event 3′ to the target position (relative to the target position on the first strand) on the second strand. This embodiment allows the use of a single Cas9 molecule, e.g., a single Cas9 molecule that is a nickase (e.g., a Cas9 molecule with an N863A mutation), e.g., to place single-strand cleavage events on each side of the target position.

[0813] For example, this embodiment can be illustrated as shown in the diagram below:

[chemical structure]

[0814] wherein X is the cleavage event and M is the target position.

[0815] In an embodiment, the cleavage event positioned by the gRNA molecule and the cleavage event positioned by the second gRNA molecule are separated by 10 to 10000, 10 to 5000, 10 to 2500, 10 to 1000, 10 to 750, 10 to 500, 10 to 400, 10 to 300, 10 to 200, 10 to 100, 10 to 75, 10 to 50, or 10 to 25 base pairs.

[0816] In an embodiment:

[0817] the gRNA molecule, together with the Cas9 molecule (a nickase), positions a cleavage event on the strand that binds to the gRNA molecule; and

[0818] the second gRNA molecule, together with the Cas9 molecule, positions a cleavage event on the strand that binds to the second gRNA molecule,

[0819] wherein:

[0820] the gRNA molecule and the second gRNA molecule bind to different strands,

[0821] the gRNA molecule positions a cleavage event 3′ to the target position on the first strand, and

[0822] the second gRNA molecule positions a cleavage event 5′ to the target position (relative to the target position on the first strand) on the second strand. This embodiment allows the use of a single Cas9 molecule, e.g., a single Cas9 molecule that is a nickase (e.g., a Cas9 molecule with a D10A mutation), e.g., to place single-strand cleavage events on each side of the target position.

[0823] For example, this embodiment can be illustrated as shown in the diagram below:

[chemical structure]

[0824] wherein X is the cleavage event and M is the target position.

[0825] In an embodiment, the cleavage event positioned by the gRNA molecule and the cleavage event positioned by the second gRNA molecule are separated by 10 to 10000, 10 to 5000, 10 to 2500, 10 to 1000, 10 to 750, 10 to 500, 10 to 400, 10 to 300, 10 to 200, 10 to 100, 10 to 75, 10 to 50, or 10 to 25 base pairs.

[0826] In an embodiment:

[0827] the gRNA molecule, together with the Cas9 molecule (a nickase), positions a cleavage event on the strand other than the strand that binds to the gRNA molecule; and

[0828] the second gRNA molecule, together with the Cas9 molecule, positions a cleavage event on the strand other than the strand that binds to the second gRNA molecule,

[0829] wherein:

[0830] the gRNA molecule and the second gRNA molecule bind to different strands,

[0831] the gRNA molecule positions a cleavage event 3′ to the target position on the first strand, and

[0832] the second gRNA molecule positions a cleavage event 5′ to the target position (relative to the target position on the first strand) on the second strand. This embodiment allows the use of a single Cas9 molecule, e.g., a single Cas9 molecule that is a nickase (e.g., a Cas9 molecule with a N863A mutation), e.g., to place single-strand cleavage events on each side of the target position.

[0833] For example, this embodiment can be illustrated as shown in the diagram below:

[chemical structure]

[0834] wherein X is the cleavage event and M is the target position.

[0835] In an embodiment, the cleavage event positioned by the gRNA molecule and the cleavage event positioned by the second gRNA molecule are separated by 10 to 10000, 10 to 5000, 10 to 2500, 10 to 1000, 10 to 750, 10 to 500, 10 to 400, 10 to 300, 10 to 200, 10 to 100, 10 to 75, 10 to 50, or 10 to 25 base pairs.

[0836] In an embodiment:

[0837] the gRNA molecule, together with the Cas9 molecule (e.g., a nickase), positions a cleavage event on the strand that binds to the gRNA molecule; and

[0838] the second gRNA molecule, together with the Cas9 molecule, positions a cleavage event on the strand that binds to the second gRNA molecule,

[0839] wherein:

[0840] the gRNA molecule and the second gRNA molecule bind to different strands,

[0841] the gRNA molecule positions a cleavage event 5′ to the target position on the first strand, and

[0842] the second gRNA molecule positions a cleavage event 5′ to the target position (relative to the target position on the first strand) on the second strand, e.g., to produce a 5′ overhang. This embodiment allows the use of a single Cas9 molecule, e.g., a single Cas9 molecule that is a nickase (e.g., a Cas9 molecule with a D10A mutation), e.g., to place single-strand cleavage events on one side of the target position, e.g., to produce a 5′ overhang.

[0843] For example, this embodiment can be illustrated as shown in the diagram below:

[chemical structure]

[0844] wherein X is the cleavage event and M is the target position.

[0845] In an embodiment, the cleavage event positioned by the gRNA molecule and the cleavage event positioned by the second gRNA molecule are separated by 10 to 10000, 10 to 5000, 10 to 2500, 10 to 1000, 10 to 750, 10 to 500, 10 to 400, 10 to 300, 10 to 200, 10 to 100, 10 to 75, 10 to 50, or 10 to 25 base pairs.

[0846] In an embodiment:

[0847] the gRNA molecule, together with the Cas9 molecule (a nickase), positions a cleavage event on the strand other than the strand that binds to the gRNA molecule; and

[0848] the second gRNA molecule, together with the Cas9 molecule, positions a cleavage event on the strand other than the strand that binds to the second gRNA molecule,

[0849] wherein:

[0850] the gRNA molecule and the second gRNA molecule bind to different strands,

[0851] the gRNA molecule positions a cleavage event 5′ to the target position on the first strand, and

[0852] the second gRNA molecule positions a cleavage event 5′ to the target position (relative to the target position on the first strand) on the second strand, e.g., to produce a 5′ overhang. This embodiment allows the use of a single Cas9 molecule, e.g., a single Cas9 molecule that is a nickase (e.g., a Cas9 molecule with an N863A mutation), e.g., to place single-strand cleavage events on each side of the target position, e.g., to produce a 5′ overhang.

[0853] For example, this embodiment can be illustrated as shown in the diagram below:

[chemical structure]

[0854] wherein X is the cleavage event and M is the target position.

[0855] In an embodiment, the cleavage event positioned by the gRNA molecule and the cleavage event positioned by the second gRNA molecule are separated by 10 to 10000, 10 to 5000, 10 to 2500, 10 to 1000, 10 to 750, 10 to 500, 10 to 400, 10 to 300, 10 to 200, 10 to 100, 10 to 75, 10 to 50, or 10 to 25 base pairs.

[0856] In an embodiment:

[0857] the gRNA molecule, together with the Cas9 molecule (e.g., a nickase), positions a cleavage event on the strand that binds to the gRNA molecule; and

[0858] the second gRNA molecule, together with the Cas9 molecule, positions a cleavage event on the strand that binds to the second gRNA molecule,

[0859] wherein:

[0860] the gRNA molecule and the second gRNA molecule bind to different strands, the gRNA molecule positions a cleavage event 3′ to the target position on the first strand, and

[0861] the second gRNA molecule positions a cleavage event 3′ to the target position (relative to the target position on the first strand) on the second strand, e.g., to produce a 5′ overhang. This embodiment allows the use of a single Cas9 molecule, e.g., a single Cas9 molecule that is a nickase (e.g., a Cas9 molecule with a D10A mutation), e.g., to place single-strand cleavage events on one side of the target position, e.g., to produce a 5′ overhang.

[0862] For example, this embodiment can be illustrated as shown in the diagram below:

[chemical structure]

[0863] wherein X is the cleavage event and M is the target position.

[0864] In an embodiment, the cleavage event positioned by the gRNA molecule and the cleavage event positioned by the second gRNA molecule are separated by 10 to 10000, 10 to 5000, 10 to 2500, 10 to 1000, 10 to 750, 10 to 500, 10 to 400, 10 to 300, 10 to 200, 10 to 100, 10 to 75, 10 to 50, or 10 to 25 base pairs.

[0865] In an embodiment:

[0866] the gRNA molecule, together with the Cas9 molecule (a nickase), positions a cleavage event on the strand other than the strand that binds to the gRNA molecule; and

[0867] the second gRNA molecule, together with the Cas9 molecule, positions a cleavage event on the strand other than the strand that binds to the second gRNA molecule,

[0868] wherein:

[0869] the gRNA molecule and the second gRNA molecule bind to different strands,

[0870] the gRNA molecule positions a cleavage event 3′ to the target position on the first strand, and

[0871] the second gRNA molecule positions a cleavage event 3′ to the target position (relative to the target position on the first strand) on the second strand, e.g., to produce a 5′ overhang. This embodiment allows the use of a single Cas9 molecule, e.g., a single Cas9 molecule that is a nickase (e.g., a Cas9 molecule with an N863A mutation), e.g., to place single-strand cleavage events on each side of the target position, e.g., to produce a 5′ overhang.

[0872] For example, this embodiment can be illustrated as shown in the diagram below:

[chemical structure]

[0873] wherein X is the cleavage event and M is the target position.

[0874] In an embodiment, the cleavage event positioned by the gRNA molecule and the cleavage event positioned by the second gRNA molecule are separated by 10 to 10000, 10 to 5000, 10 to 2500, 10 to 1000, 10 to 750, 10 to 500, 10 to 400, 10 to 300, 10 to 200, 10 to 100, 10 to 75, 10 to 50, or 10 to 25 base pairs.

[0875] In an embodiment:

[0876] the gRNA molecule, together with the Cas9 molecule (e.g., a nickase), positions a cleavage event on the strand that binds to the gRNA molecule; and

[0877] the second gRNA molecule, together with the Cas9 molecule, positions a cleavage event on the strand that binds to the second gRNA molecule,

[0878] wherein:

[0879] the gRNA molecule and the second gRNA molecule bind to different strands,

[0880] the gRNA molecule positions a cleavage event 5′ to the target position on the first strand, and the second gRNA molecule positions a cleavage event 5′ to the target position (relative to the target position on the first strand) on the second strand, e.g., to produce a 3′ overhang. This embodiment allows the use of a single Cas9 molecule, e.g., a single Cas9 molecule that is a nickase (e.g., a Cas9 molecule with a D10A mutation), e.g., to place single-strand cleavage events on one side of the target position, e.g., to produce a 3′ overhang.

[0881] For example, this embodiment can be illustrated as shown in the diagram below:

[chemical structure]

[0882] wherein X is the cleavage event and M is the target position.

[0883] In an embodiment, the cleavage event positioned by the gRNA molecule and the cleavage event positioned by the second gRNA molecule are separated by 10 to 10000, 10 to 5000, 10 to 2500, 10 to 1000, 10 to 750, 10 to 500, 10 to 400, 10 to 300, 10 to 200, 10 to 100, 10 to 75, 10 to 50, or 10 to 25 base pairs.

[0884] In an embodiment:

[0885] the gRNA molecule, together with the Cas9 molecule (a nickase), positions a cleavage event on the strand other than the strand that binds to the gRNA molecule; and

[0886] the second gRNA molecule, together with the Cas9 molecule, positions a cleavage event on the strand other than the strand that binds to the second gRNA molecule,

[0887] wherein:

[0888] the gRNA molecule and the second gRNA molecule bind to different strands,

[0889] the gRNA molecule positions a cleavage event 5′ to the target position on the first strand, and

[0890] the second gRNA molecule positions a cleavage event 5′ to the target position (relative to the target position on the first strand) on the second strand, e.g., to produce a 3′ overhang. This embodiment allows the use of a single Cas9 molecule, e.g., a single Cas9 molecule that is a nickase (e.g., a Cas9 molecule with an N863A mutation), e.g., to place single-strand cleavage events on each side of the target position, e.g., to produce a 3′ overhang.

[0891] For example, this embodiment can be illustrated as shown in the diagram below:

[chemical structure]

[0892] wherein X is the cleavage event and M is the target position.

[0893] In an embodiment, the cleavage event positioned by the gRNA molecule and the cleavage event positioned by the second gRNA molecule are separated by 10 to 10000, 10 to 5000, 10 to 2500, 10 to 1000, 10 to 750, 10 to 500, 10 to 400, 10 to 300, 10 to 200, 10 to 100, 10 to 75, 10 to 50, or 10 to 25 base pairs.

[0894] In an embodiment:

[0895] the gRNA molecule, together with the Cas9 molecule (e.g., a nickase), positions a cleavage event on the strand that binds to the gRNA molecule; and

[0896] the second gRNA molecule, together with the Cas9 molecule, positions a cleavage event on the strand that binds to the second gRNA molecule,

[0897] wherein:

[0898] the gRNA molecule and the second gRNA molecule bind to different strands,

[0899] the gRNA molecule positions a cleavage event 3′ to the target position on the first strand, and

[0900] the second gRNA molecule positions a cleavage event 3′ to the target position (relative to the target position on the first strand) on the second strand, e.g., to produce a 3′ overhang. This embodiment allows the use of a single Cas9 molecule, e.g., a single Cas9 molecule that is a nickase (e.g., a Cas9 molecule with a D10A mutation), e.g., to place single-strand cleavage events on one side of the target position, e.g., to produce a 3′ overhang.

[0901] For example, this embodiment can be illustrated as shown in the diagram below:

[chemical structure]

[0902] wherein X is the cleavage event and M is the target position.

[0903] In an embodiment, the cleavage event positioned by the gRNA molecule and the cleavage event positioned by the second gRNA molecule are separated by 10 to 10000, 10 to 5000, 10 to 2500, 10 to 1000, 10 to 750, 10 to 500, 10 to 400, 10 to 300, 10 to 200, 10 to 100, 10 to 75, 10 to 50, or 10 to 25 base pairs.

[0904] In an embodiment:

[0905] the gRNA molecule, together with the Cas9 molecule (a nickase), positions a cleavage event on the strand other than the strand that binds to the gRNA molecule; and

[0906] the second gRNA molecule, together with the Cas9 molecule, positions a cleavage event on the strand other than the strand that binds to the second gRNA molecule,

[0907] wherein:

[0908] the gRNA molecule and the second gRNA molecule bind to different strands,

[0909] the gRNA molecule positions a cleavage event 3′ to the target position on the first strand, and

[0910] the second gRNA molecule positions a cleavage event 3′ to the target position (relative to the target position on the first strand) on the second strand, e.g., to produce a 3′ overhang. This embodiment allows the use of a single Cas9 molecule, e.g., a single Cas9 molecule that is a nickase (e.g., a Cas9 molecule with an N863A mutation), e.g., to place single-strand cleavage events on each side of the target position, e.g., to produce a 3′ overhang.

[0911] For example, this embodiment can be illustrated as shown in the diagram below:

[chemical structure]

[0912] wherein X is the cleavage event and M is the target position.

[0913] In an embodiment, the cleavage event positioned by the gRNA molecule and the cleavage event positioned by the second gRNA molecule are separated by 10 to 10000, 10 to 5000, 10 to 2500, 10 to 1000, 10 to 750, 10 to 500, 10 to 400, 10 to 300, 10 to 200, 10 to 100, 10 to 75, 10 to 50, or 10 to 25 base pairs.

### Homology Arms of the Donor Template

[0914] A homology arm should extend at least as far as the region in which end resection may occur, e.g., in order to allow the resected single stranded overhang to find a complementary region within the donor template. The overall length could be limited by parameters such as plasmid size or viral packaging limits. In an embodiment, a homology arm does not extend into repeated elements, e.g., Alu repeats or LINE repeats.

[0915] Exemplary homology arm lengths include at least 50, 100, 250, 500, 750, 1000, 2000, 3000, 4000, or 5000 nucleotides. In some embodiments, the homology arm length is 50-100, 100-250, 250-500, 500-750, 750-1000, 1000-2000, 2000-3000, 3000-4000, or 4000-5000 nucleotides.

[0916] Target position, as used herein, refers to a site on a target nucleic acid (e.g., the chromosome) that is modified by a Cas9 molecule-dependent process. For example, the target position can be a modified Cas9 molecule cleavage of the target nucleic acid and template nucleic acid directed modification, e.g., correction, of the target position. In an embodiment, a target position can be a site between two nucleotides, e.g., adjacent nucleotides, on the target nucleic acid into which one or more nucleotides is added. The target position may comprise one or more nucleotides that are altered, e.g., corrected, by a template nucleic acid. In an embodiment, the target position is within a target sequence (e.g., the sequence to which the gRNA binds). In an embodiment, a target position is upstream or downstream of a target sequence (e.g., the sequence to which the gRNA binds).

[0917] A template nucleic acid, as that term is used herein, refers to a nucleic acid sequence which can be used in conjunction with a Cas9 molecule and a gRNA molecule to alter the structure of a target position. In certain embodiments, the target nucleic acid is modified to have the some or all of the sequence of the template nucleic acid, typically at or near cleavage site(s). In an embodiment, the template nucleic acid is single stranded. In certain embodiments, the template nucleic acid is double stranded. In certain embodiments, the template nucleic acid is DNA, e.g., double stranded DNA. In other embodiments, the template nucleic acid is single stranded DNA. In certain embodiments, the template nucleic acid is encoded on the same vector backbone, e.g., AAV genome, plasmid DNA, as the Cas9 and gRNA. In an embodiment, the template nucleic acid is excised from a vector backbone in vivo, e.g., it is flanked by gRNA recognition sequences. In certain embodiments, the template nucleic acid comprises endogenous genomic sequence.

[0918] In certain embodiments, the template nucleic acid alters the structure of the target position by participating in an HDR event. In certain embodiments, the template nucleic acid alters the sequence of the target position. In certain embodiments, the template nucleic acid results in the incorporation of a modified, or non-naturally occurring base into the target nucleic acid.

[0919] Typically, the template sequence undergoes a breakage mediated or catalyzed recombination with the target sequence. In certain embodiments, the template nucleic acid includes sequence that corresponds to a site on the target sequence that is cleaved by an eaCas9 mediated cleavage event. In certain embodiments, the template nucleic acid includes sequence that corresponds to both, a first site on the target sequence that is cleaved in a first Cas9 mediated event, and a second site on the target sequence that is cleaved in a second Cas9 mediated event.

[0920] In an embodiment, the template nucleic acid can include sequence which results in an alteration in the coding sequence of a translated sequence, e.g., one which results in the substitution of one amino acid for another in a protein product, e.g., transforming a mutant allele into a wild type allele, transforming a wild type allele into a mutant allele, and/or introducing a stop codon, insertion of an amino acid residue, deletion of an amino acid residue, or a nonsense mutation.

[0921] In other embodiments, the template nucleic acid can include sequence which results in an alteration in a non-coding sequence, e.g., an alteration in an exon or in a 5′ or 3′ non-translated or non-transcribed region. Such alterations include an alteration in a control element, e.g., a promoter, enhancer, and an alteration in a cis-acting or trans-acting control element.

[0922] A template nucleic acid having homology with a target position in the HBB gene can be used to alter the structure of a target sequence (e.g., to correct a mutation present in a target position of an endogenous HBB gene). The template sequence can be used to alter an unwanted structure, e.g., an unwanted or mutant nucleotide.

[0923] A template nucleic acid typically comprises the following components:

[0924] [5′ homology arm]-[replacement sequence]-[3′ homology arm].

[0925] The homology arms provide for recombination into the chromosome, thus replacing the undesired element, e.g., a mutation or signature, with the replacement sequence. In certain embodiments, the homology arms flank the most distal cleavage sites.

[0926] In certain embodiments, the 3′ end of the 5′ homology arm is the position next to the 5′ end of the replacement sequence. In an embodiment, the 5′ homology arm can extend at least 10, 20, 30, 40, 50, 100, 200, 300, 400, 500, 600, 700, 800, 900, 1000, 1500, 2000, 3000, 4000, or 5000 nucleotides 5′ from the 5′ end of the replacement sequence.

[0927] In certain embodiments, the 5′ end of the 3′ homology arm is the position next to the 3′ end of the replacement sequence. In certain embodiments, the 3′ homology arm can extend at least 10, 20, 30, 40, 50, 100, 200, 300, 400, 500, 600, 700, 800, 900, 1000, 1500, 2000, 3000, 4000, or 5000 nucleotides 3′ from the 3′ end of the replacement sequence.

[0928] In certain embodiments, to alter one or more nucleotides at a target position (e.g., to correct a mutation), the homology arms, e.g., the 5′ and 3′ homology arms, may each comprise about 1000 bp of sequence flanking the most distal gRNAs (e.g., 1000 bp of sequence on either side of the target position (e.g., the mutation).

[0929] It is contemplated herein that one or both homology arms may be shortened to avoid including certain sequence repeat elements, e.g., Alu repeats or LINE elements. For example, a 5′ homology arm may be shortened to avoid a sequence repeat element. In other embodiments, a 3′ homology arm may be shortened to avoid a sequence repeat element. In some embodiments, both the 5′ and the 3′ homology arms may be shortened to avoid including certain sequence repeat elements.

[0930] It is contemplated herein that template nucleic acids for altering the sequence (e.g., correcting a mutation) of a target position may be designed for use as a single-stranded oligonucleotide, e.g., a single-stranded oligodeoxynucleotide (ssODN). When using a ssODN, 5′ and 3′ homology arms may range up to about 200 bp in length, e.g., at least 25, 50, 75, 100, 125, 150, 175, or 200 bp in length. Longer homology arms are also contemplated for ssODNs as improvements in oligonucleotide synthesis continue to be made. In some embodiments, a longer homology arm is made by a method other than chemical synthesis, e.g., by denaturing a long double stranded nucleic acid and purifying one of the strands, e.g., by affinity for a strand-specific sequence anchored to a solid substrate.

[0931] While not wishing to be bound by theory, in certain embodiments alt-HDR proceeds more efficiently when the template nucleic acid has extended homology 5′ to the nick (i.e., in the 5′ direction of the nicked strand). Accordingly, in some embodiments, the template nucleic acid has a longer homology arm and a shorter homology arm, wherein the longer homology arm can anneal 5′ of the nick. In some embodiments, the arm that can anneal 5′ to the nick is at least 25, 50, 75, 100, 125, 150, 175, or 200, 300, 400, 500, 600, 700, 800, 900, 1000, 1500, 2000, 3000, 4000, or 5000 nucleotides from the nick or the 5′ or 3′ end of the replacement sequence. In some embodiments, the arm that can anneal 5′ to the nick is at least 10%, 20%, 30%, 40%, or 50% longer than the arm that can anneal 3′ to the nick. In some embodiments, the arm that can anneal 5′ to the nick is at least 2×, 3×, 4×, or 5× longer than the arm that can anneal 3′ to the nick. Depending on whether a ssDNA template can anneal to the intact strand or the nicked strand, the homology arm that anneals 5′ to the nick may be at the 5′ end of the ssDNA template or the 3′ end of the ssDNA template, respectively.

[0932] Similarly, in some embodiments, the template nucleic acid has a 5′ homology arm, a replacement sequence, and a 3′ homology arm, such that the template nucleic acid has extended homology to the 5′ of the nick. For example, the 5′ homology arm and 3′ homology arm may be substantially the same length, but the replacement sequence may extend farther 5′ of the nick than 3′ of the nick. In some embodiments, the replacement sequence extends at least 10%, 20%, 30%, 40%, 50%, 2×, 3×, 4×, or 5× further to the 5′ end of the nick than the 3′ end of the nick.

[0933] While not wishing to be bound by theory, In some embodiments, alt-HDR proceeds more efficiently when the template nucleic acid is centered on the nick. Accordingly, in some embodiments, the template nucleic acid has two homology arms that are essentially the same size. For instance, the first homology arm of a template nucleic acid may have a length that is within 10%, 9%, 8%, 7%, 6%, 5%, 4%, 3%, 2%, or 1% of the second homology arm of the template nucleic acid.

[0934] Similarly, in some embodiments, the template nucleic acid has a 5′ homology arm, a replacement sequence, and a 3′ homology arm, such that the template nucleic acid extends substantially the same distance on either side of the nick. For example, the homology arms may have different lengths, but the replacement sequence may be selected to compensate for this. For example, the replacement sequence may extend further 5′ from the nick than it does 3′ of the nick, but the homology arm 5′ of the nick is shorter than the homology arm 3′ of the nick, to compensate. The converse is also possible, e.g., that the replacement sequence may extend further 3′ from the nick than it does 5′ of the nick, but the homology arm 3′ of the nick is shorter than the homology arm 5′ of the nick, to compensate.

### Exemplary Template Nucleic Acids

[0935] In a preferred embodiment, and in order to increase DNA repair via gene conversion, the template nucleic acid is an endogenous homologous region. In certain embodiments, the template nucleic acid is double stranded. In other embodiments, the template nucleic acid is single stranded. In certain embodiments, the template nucleic acid comprises a single stranded portion and a double stranded portion. In certain embodiments, the template nucleic acid comprises about 50 to 100, e.g., 55 to 95, 60 to 90, 65 to 85, or 70 to 80 bp, homology on either side of the nick and/or replacement sequence. In certain embodiments, the template nucleic acid comprises about 50, 55, 60, 65, 70, 75, 80, 85, 90, 95, or 100 bp homology 5′ of the nick or replacement sequence, 3′ of the nick or replacement sequence, or both 5′ and 3′ of the nick or replacement sequences.

[0936] In certain embodiments, the template nucleic acid comprises about 150 to 200 bp, e.g., 155 to 195, 160 to 190, 165 to 185, or 170 to 180 bp, homology 3′ of the nick and/or replacement sequence. In certain embodiments, the template nucleic acid comprises about 150, 155, 160, 165, 170, 175, 180, 185, 190, 195, or 200 by homology 3′ of the nick or replacement sequence. In some embodiments, the template nucleic acid comprises less than about 100, 90, 80, 70, 60, 50, 40, 30, 20, 15, or 10 bp homology 5′ of the nick or replacement sequence.

[0937] In certain embodiments, the template nucleic acid comprises about 150 to 200 bp, e.g., 155 to 195, 160 to 190, 165 to 185, or 170 to 180 bp, homology 5′ of the nick and/or replacement sequence. In certain embodiments, the template nucleic acid comprises about 150, 155, 160, 165, 170, 175, 180, 185, 190, 195, or 200 by homology 5′ of the nick or replacement sequence. In certain embodiments, the template nucleic acid comprises less than about 100, 90, 80, 70, 60, 50, 40, 30, 20, 15, or 10 bp homology 3′ of the nick or replacement sequence.

[0938] In certain embodiments, the template nucleic acid comprises a nucleotide sequence, e.g., of one or more nucleotides, that will be added to or will template a change in the target nucleic acid. In other embodiments, the template nucleic acid comprises a nucleotide sequence that may be used to modify the target position. In other embodiments, the template nucleic acid comprises a nucleotide sequence, e.g., of one or more nucleotides, that corresponds to wild type sequence of the target nucleic acid, e.g., of the target position.

[0939] The template nucleic acid may comprise a replacement sequence. In some embodiments, the template nucleic acid comprises a 5′ homology arm. In some embodiments, the template nucleic acid comprises a 3′ homology arm.

[0940] In certain embodiments, the template nucleic acid is linear double stranded DNA. The length may be, e.g., about 150-200 bp, e.g., about 150, 160, 170, 180, 190, or 200 bp. The length may be, e.g., at least 150, 160, 170, 180, 190, or 200 bp. In some embodiments, the length is no greater than 150, 160, 170, 180, 190, or 200 bp. In some embodiments, a double stranded template nucleic acid has a length of about 160 bp, e.g., about 155-165, 150-170, 140-180, 130-190, 120-200, 110-210, 100-220, 90-230, or 80-240 bp.

[0941] The template nucleic acid can be linear single stranded DNA. In certain embodiments, the template nucleic acid is (i) linear single stranded DNA that can anneal to the nicked strand of the target nucleic acid, (ii) linear single stranded DNA that can anneal to the intact strand of the target nucleic acid, (iii) linear single stranded DNA that can anneal to the plus strand of the target nucleic acid, (iv) linear single stranded DNA that can anneal to the minus strand of the target nucleic acid, or more than one of the preceding. The length may be, e.g., about 150-200 nucleotides, e.g., about 150, 160, 170, 180, 190, or 200 nucleotides. The length may be, e.g., at least 150, 160, 170, 180, 190, or 200 nucleotides. In some embodiments, the length is no greater than 150, 160, 170, 180, 190, or 200 nucleotides. In some embodiments, a single stranded template nucleic acid has a length of about 160 nucleotides, e.g., about 155-165, 150-170, 140-180, 130-190, 120-200, 110-210, 100-220, 90-230, or 80-240 nucleotides.

[0942] In some embodiments, the template nucleic acid is circular double stranded DNA, e.g., a plasmid. In some embodiments, the template nucleic acid comprises about 500 to 1000 bp of homology on either side of the replacement sequence and/or the nick. In some embodiments, the template nucleic acid comprises about 300, 400, 500, 600, 700, 800, 900, 1000, 1500, or 2000 bp of homology 5′ of the nick or replacement sequence, 3′ of the nick or replacement sequence, or both 5′ and 3′ of the nick or replacement sequence. In some embodiments, the template nucleic acid comprises at least 300, 400, 500, 600, 700, 800, 900, 1000, 1500, or 2000 bp of homology 5′ of the nick or replacement sequence, 3′ of the nick or replacement sequence, or both 5′ and 3′ of the nick or replacement sequence. In some embodiments, the template nucleic acid comprises no more than 300, 400, 500, 600, 700, 800, 900, 1000, 1500, or 2000 bp of homology 5′ of the nick or replacement sequence, 3′ of the nick or replacement sequence, or both 5′ and 3′ of the nick or replacement sequence.

[0943] In certain embodiments, one or both homology arms may be shortened to avoid including certain sequence repeat elements, e.g., Alu repeats, LINE elements. For example, a 5′ homology arm may be shortened to avoid a sequence repeat element, while a 3′ homology arm may be shortened to avoid a sequence repeat element. In some embodiments, both the 5′ and the 3′ homology arms may be shortened to avoid including certain sequence repeat elements.

[0944] In some embodiments, the template nucleic acid is an adenovirus vector, e.g., an AAV vector, e.g., a ssDNA molecule of a length and sequence that allows it to be packaged in an AAV capsid. The vector may be, e.g., less than 5 kb and may contain an ITR sequence that promotes packaging into the capsid. The vector may be integration-deficient. In some embodiments, the template nucleic acid comprises about 150 to 1000 nucleotides of homology on either side of the replacement sequence and/or the nick. In some embodiments, the template nucleic acid comprises about 100, 150, 200, 300, 400, 500, 600, 700, 800, 900, 1000, 1500, or 2000 nucleotides 5′ of the nick or replacement sequence, 3′ of the nick or replacement sequence, or both 5′ and 3′ of the nick or replacement sequence. In some embodiments, the template nucleic acid comprises at least 100, 150, 200, 300, 400, 500, 600, 700, 800, 900, 1000, 1500, or 2000 nucleotides 5′ of the nick or replacement sequence, 3′ of the nick or replacement sequence, or both 5′ and 3′ of the nick or replacement sequence. In some embodiments, the template nucleic acid comprises at most 100, 150, 200, 300, 400, 500, 600, 700, 800, 900, 1000, 1500, or 2000 nucleotides 5′ of the nick or replacement sequence, 3′ of the nick or replacement sequence, or both 5′ and 3′ of the nick or replacement sequence.

[0945] In some embodiments, the template nucleic acid is a lentiviral vector, e.g., an IDLV (integration deficiency lentivirus). In some embodiments, the template nucleic acid comprises about 500 to 1000 base pairs of homology on either side of the replacement sequence and/or the nick. In some embodiments, the template nucleic acid comprises about 300, 400, 500, 600, 700, 800, 900, 1000, 1500, or 2000 bp of homology 5′ of the nick or replacement sequence, 3′ of the nick or replacement sequence, or both 5′ and 3′ of the nick or replacement sequence. In some embodiments, the template nucleic acid comprises at least 300, 400, 500, 600, 700, 800, 900, 1000, 1500, or 2000 bp of homology 5′ of the nick or replacement sequence, 3′ of the nick or replacement sequence, or both 5′ and 3′ of the nick or replacement sequence. In some embodiments, the template nucleic acid comprises no more than 300, 400, 500, 600, 700, 800, 900, 1000, 1500, or 2000 bp of homology 5′ of the nick or replacement sequence, 3′ of the nick or replacement sequence, or both 5′ and 3′ of the nick or replacement sequence.

[0946] In an embodiment, the template nucleic acid comprises one or more mutations, e.g., silent mutations, that prevent Cas9 from recognizing and cleaving the template nucleic acid. The template nucleic acid may comprise, e.g., at least 1, 2, 3, 4, 5, 10, 20, 30, 40, or 50 silent mutations relative to the corresponding sequence in the genome of the cell to be altered. In certain embodiments, the template nucleic acid comprises at most 2, 3, 4, 5, 10, 20, 30, 40, or 50 silent mutations relative to the corresponding sequence in the genome of the cell to be altered. In an embodiment, the template nucleic acid comprises one or more mutations, e.g., silent mutations that prevent Cas9 from recognizing and cleaving the template nucleic acid. The template nucleic acid may comprise, e.g., at least 1, 2, 3, 4, 5, 10, 20, 30, 40, or 50 silent mutations relative to the corresponding sequence in the genome of the cell to be altered. In certain embodiments, the template nucleic acid comprises at most 2, 3, 4, 5, 10, 20, 30, 40, or 50 silent mutations relative to the corresponding sequence in the genome of the cell to be altered.

[0947] In certain embodiments, the template nucleic acid alters the structure of the target position by participating in an HDR event. In some embodiments, the template nucleic acid alters the sequence of the target position. In some embodiments, the template nucleic acid results in the incorporation of a modified, or non-naturally occurring nucleotide base into the target nucleic acid.

[0948] Typically, the template sequence undergoes a breakage mediated or catalyzed recombination with the target sequence. In some embodiments, the template nucleic acid includes sequence that corresponds to a site on the target sequence that is cleaved by an eaCas9 mediated cleavage event. In some embodiments, the template nucleic acid includes sequence that corresponds to both, a first site on the target sequence that is cleaved in a first Cas9 mediated event, and a second site on the target sequence that is cleaved in a second Cas9 mediated event.

[0949] In some embodiments, the template nucleic acid can include sequence which results in an alteration in the coding sequence of a translated sequence, e.g., one which results in the substitution of one amino acid for another in a protein product, e.g., transforming a mutant allele into a wild type allele, transforming a wild type allele into a mutant allele, and/or introduction of a stop codon, insertion of an amino acid residue, deletion of an amino acid residue, or a nonsense mutation.

[0950] In some embodiments, the template nucleic acid can include sequence which results in an alteration in a non-coding sequence, e.g., an alteration in an exon or in a 5′ or 3′ non-translated or non-transcribed region. Such alterations include an alteration in a control element, e.g., a promoter or enhancer, or an alteration in a cis-acting or trans-acting control element.

[0951] In some embodiments, a template nucleic acid having homology with a target position can be used to alter the structure of a target sequence. The template nucleic acid sequence can be used to alter an unwanted structure, e.g., an unwanted or mutant nucleotide.

[0952] Exemplary template nucleic acids (also referred to herein as donor constructs) to correction a mutation, e.g., at E6, e.g., E6V, in the HBB gene, are provided.

[0953] Suitable sequence for a 5′ homology arm can be selected from (e.g., includes a portion of) or include the nucleic acid sequence of SEQ ID NO: 16257 (5′H arm).

[0954] Suitable sequence for the 3′ homology arm can be selected from (e.g., includes a portion of) or include the nucleic acid sequence of SEQ ID NO: 16258 (3′H arm).

[0955] In some embodiments, the replacement sequence comprises or consists of an adenine (A) residue to correct the amino acid sequence to a glutamic acid (E) residue.

[0956] In some embodiments, to correct a mutation, e.g., at E6, e.g., E6V, in the HBB gene, the homology arms, e.g., the 5′ and 3′ homology arms, may each comprise about 1000 base pairs (bp) of sequence flanking the most distal gRNAs (e.g., 1100 bp of sequence on either side of the mutation). The 5′ homology arm is shown as bold sequence, codon 6 is shown as underlined sequence, the inserted base to correct the mutation at E6, e.g., E6V, is shown as boxed sequence, and the 3′ homology arm is shown as no emphasis sequence:

(Template Construct 1;
SEQ ID NO: 16259)
ATAGGAACTTGAATCAAGGAAATGATTTTAAAACGCAGTATTCTTAGTGGACTAGAGGA
AAAAAATAATCTGAGCCAAGTAGAAGACCTTTTCCCCTCCTACCCCTACTTTCTAAGTC
ACAGAGGCTTTTTGTTCCCCCAGACACTCTTGCAGATTAGTCCAGGCAGAAACAGTTAG
ATGTCCCCAGTTAACCTCCTATTTGACACCACTGATTACCCCATTGATAGTCACACTTT
GGGTTGTAAGTGACTTTTTATTTATTTGTATTTTTGACTGCATTAAGAGGTCTCTAGTTT
TTTATCTCTTGTTTCCCAAAACCTAATAAGTAACTAATGCACAGAGCACATTGATTTGT
ATTTATTCTATTTTTAGACATAATTTATTAGCATGCATGAGCAAATTAAGAAAAACAACA
ACAAATGAATGCATATATATGTATATGTATGTGTGTATATATACACACATATATATATAT
ATTTTTTCTTTTCTTACCAGAAGGTTTTAATCCAAATAAGGAGAAGATATGCTTAGAAC
CGAGGTAGAGTTTTCATCCATTCTGTCCTGTAAGTATTTTGCATATTCTGGAGACGCAG
GAAGAGATCCATCTACATATCCCAAAGCTGAATTATGGTAGACAAAACTCTTCCACTTT
TAGTGCATCAACTTCTTATTTGTGTAATAAGAAAATTGGGAAAACGATCTTCAATATGC
TTACCAAGCTGTGATTCCAAATATTACGTAAATACACTTGCAAAGGAGGATGTTTTTAG
TAGCAATTTGTACTGATGGTATGGGGCCAAGAGATATATCTTAGAGGGAGGGCTGAGG
GTTTGAAGTCCAACTCCTAAGCCAGTGCCAGAAGAGCCAAGGACAGGTACGGCTGTCA
TCACTTAGACCTCACCCTGTGGAGCCACACCCTAGGGTTGGCCAATCTACTCCCAGGA
GCAGGGAGGGCAGGAGCCAGGGCTGGGCATAAAAGTCAGGGCAGAGCCATCTATTGC
TTACATTTGCTTCTGACACAACTGTGTTCACTAGCAACCTCAAACAGACACCATGGTGC

[chemical structure]

AGTTGGTGGTGAGGCCCTGGGCAGGTTGGTATCAAGGTTACAAGACAGGTTTAAGGAGACC
AATAGAAACTGGGCATGTGGAGACAGAGAAGACTCTTGGGTTTCTGATAGGCACTGACTCTC
TCTGCCTATTGGTCTATTTTCCCACCCTTAGGCTGCTGGTGGTCTACCCTTGGACCCAGAGGT
TCTTTGAGTCCTTTGGGGATCTGTCCACTCCTGATGCTGTTATGGGCAACCCTAAGGTGAAGG
CTCATGGCAAGAAAGTGCTCGGTGCCTTTAGTGATGGCCTGGCTCACCTGGACAACCTCAAG
GGCACCTTTGCCACACTGAGTGAGCTGCACTGTGACAAGCTGCACGTGGATCCTGAGAACTT
CAGGGTGAGTCTATGGGACGCTTGATGTTTTCTTTCCCCTTCTTTTCTATGGTTAAGTTCATGT
CATAGGAAGGGGATAAGTAACAGGGTACAGTTTAGAATGGGAAACAGACGAATGATTGCAT
CAGTGTGGAAGTCTCAGGATCGTTTTAGTTTCTTTTATTTGCTGTTCATAACAATTGTTTTCTT
TTGTTTAATTCTTGCTTTCTTTTTTTTTCTTCTCCGCAATTTTTACTATTATACTTAATGCCTTA
ACATTGTGTATAACAAAAGGAAATATCTCTGAGATACATTAAGTAACTTAAAAAAAAACTTT
ACACAGTCTGCCTAGTACATTACTATTTGGAATATATGTGTGCTTATTTGCATATTCATAATC
TCCCTACTTTATTTTCTTTTATTTTTAATTGATACATAATCATTATACATATTTATGGGTTAAA
GTGTAATGTTTTAATATGTGTACACATATTGACCAAATCAGGGTAATTTTGCATTTGTAATTT
TAAAAAATGCTTTCTTCTTTTAATATACTTTTTTGTTTATCTTATTTCTAATACTTTCCCTAATC
TCTTTCTTTCAGGGCAATAATGATACAATGTATCATGCCTCTTTGCACCATTCTAAAGAATAA
CAGTGATAATTTCTGGGTTAAGGCAATAGCAATATCTCTGCATATAAATATTTCTGCATATA
AATTGTAACTG.

[0957] In some embodiments, shorter homology arms, e.g., 5′ and/or 3′ homology arms may be used. In certain embodiments, the length of the 5′ homology arm is about 5 to about 100 nucleotides. In some embodiments, the length of the 5′ homology arm is about 10 to about 150 nucleotides. In some embodiments, the length of the 5′ homology arm is about 20 to about 150 nucleotides. In certain embodiments, the length of the 5′ homology arm is about 10, 20, 50, 100, 150, 200, 250, 300, 350, 400, 450, 500, 550, 600, 650, 700, 750, 800, 850, 900, 950, 1000, 1100, 1200, or more nucleotides in length.

[0958] In certain embodiments, the length of the 3′ homology arm is about 5 to about 100 nucleotides. In some embodiments, the length of the 3′ homology arm is about 10 to about 150 nucleotides. In some embodiments, the length of the 3′ homology arm is about 20 to about 150 nucleotides. In certain embodiments, the length of the 3′ homology arm is about 10, 20, 50, 100, 150, 200, 250, 300, 350, 400, 450, 500, 550, 600, 650, 700, 750, 800, 850, 900, 950, 1000, 1100, 1200, or more nucleotides in length.

[0959] It is contemplated herein that one or both homology arms may be shortened to avoid including certain sequence repeat elements, e.g., Alu repeats, LINE elements. For example, a 5′ homology arm may be shortened to avoid a sequence repeat element. In one embodiment, a 3′ homology arm may be shortened to avoid a sequence repeat element. In one embodiment, both the 5′ and the 3′ homology arms may be shortened to avoid including certain sequence repeat elements. In some embodiments, the length of the 5′ homology arm is at least 50 nucleotides in length, but not long enough to include a repeated element. In some embodiments, the length of the 5′ homology arm is at least 100 nucleotides in length, but not long enough to include a repeated element. In some embodiments, the length of the 5′ homology arm is at least 150 nucleotides in length, but not long enough to include a repeated element. In some embodiments, the length of the 3′ homology arm is at least 50 nucleotides in length, but not long enough to include a repeated element. In some embodiments, the length of the 3′ homology arm is at least 100 nucleotides in length, but not long enough to include a repeated element. In some embodiments, the length of the 3′ homology arm is at least 150 nucleotides in length, but not long enough to include a repeated element.

[0960] It is contemplated herein that template nucleic acids for correcting a mutation may be designed for use as a single-stranded oligonucleotide (ssODN), e.g., a single-stranded oligodeoxynucleotide. When using a ssODN, 5′ and 3′ homology arms may range up to about 200 bp in length, e.g., at least 25, 50, 75, 100, 125, 150, 175, or 200 bp in length. Longer homology arms are also contemplated for ssODNs as improvements in oligonucleotide synthesis continue to be made.

[0961] In one embodiment, an ssODN may be used to correct a mutation, e.g., E6V in the HBB gene. For example, the ssODN may include 50 bp 5′ and 3′ homology arms as shown below. The 5′ homology arm is shown as bold sequence, codon 6 is shown as underlined sequence, the inserted base to correct the E6V mutation is shown as boxed sequence, and the 3′ homology arm is shown as no emphasis sequence.

(Template Construct 2;
SEQ ID NO: 16260)
ACTGTGTTCACTAGCAACCTCAAACAGACACCATGGTGCATCTGACTC

[chemical structure]

CGTGGATGAAGT

[0962] Silent Mutations in the Template Nucleic Acid

[0963] It is contemplated herein that Cas9 could potentially cleave donor constructs either prior to or following homology directed repair (e.g., homologous recombination), resulting in a possible non-homologous-end-joining event and further DNA sequence mutation at the chromosomal locus of interest. Therefore, to avoid cleavage of the donor sequence before and/or after Cas9-mediated homology directed repair, in some embodiments, alternate versions of the donor sequence may be used where silent mutations are introduced. These silent mutations may disrupt Cas9 binding and cleavage, but not disrupt the amino acid sequence of the repaired gene. For example, mutations may include those made to a donor sequence to repair the HBB gene, the mutant form of which can cause Sickle Cell Disease. If gRNA HBB-6 with the 20-base target sequence CGUUACUGCCCUGUGGGGCA is used to insert a donor sequence including

(SEQ ID NO: 16297)

[chemical structure]

AGgGTGAACGTGGATGAAGT,

where the italic A is the base being corrected and the bracketed bases are those that match the guide RNA, the donor sequence may be changed to

(SEQ ID NO: 16298)

[chemical structure]

AGaTGAACGTGGATGAAGT,

where the lowercase a has been changed from a G (lower case g) at that position so that codon 15 still codes for the amino acid arginine but the PAM sequence AGG has been modified to AGA to reduce or eliminate Cas9 cleavage at that locus.

[0964] Upregulators of Gene Conversion

[0965] In certain embodiments, without being bound by theory, the methods provided herein involve up-regulating a gene conversion pathway(s). For instance, the methods may involve modulating (e.g., stimulating or overexpressing) a component (e.g., exactly one component, or one or more components, e.g., two or three components) of a gene conversion pathway, e.g., a BRCA1, BRCA2 and/or RAD51. In some embodiments, the up-regulator of gene conversion is a BRCA1. In other embodiments, the up-regulator of gene conversion is a BRCA2. In yet other embodiments, the up-regulator of gene conversion is a RAD51.

[0966] In some embodiments, the up-regulator of gene conversion is selected from the group consisting of a polypeptide of Table 5, or a polypeptide that comprises at least 60, 70, 80, 81, 82, 83, 84, 85, 86, 87, 88, 89, 90, 91, 92, 93, 94, 95, 96, 97, 98, 99 or 100% homology with, or differs by no more than 50, 40, 30, 20, 15, 14, 13, 12, 11, 10, 9, 8, 7, 6, 5, 4, 3, 2, or 1, amino acid residues from a naturally occurring polypeptide of Table 5.

TABLE 5
Polypeptides that Promote Gene Conversion

| | | SEQ ID |
|---|---|---|
| Factor | Sequence | NOs |
| BRCA2 | MPIGSKERPTFFEIFKTRCNKADLGPISLNWFEELSSEAPPYNSEPAEESEHKNNNYEPNLFKTPQRKPS | 16304 |
| | YNQLASTPIIFKEQGLTLPLYQSPVKELDKFKLDLGRNVPNSRHKSLRTVKTKMDQADDVSCPLLNSCLS | |
| | ESPVVLQCTHVTPQRDKSVVCGSLFHTPKFVKGRQTPKHISESLGAEVDPDMSWSSSLATPPTLSSTVLI | |
| | VRNEEASETVFPHDTTANVKSYFSNHDESLKKNDRFIASVTDSENTNQREAASHGFGKTSGNSFKVNSCK | |
| | DHIGKSMPNVLEDEVYETVVDTSEEDSFSLCFSKCRTKNLQKVRTSKTRKKIFHEANADECEKSKNQVKE | |
| | KYSFVSEVEPNDTDPLDSNVANQKPFESGSDKISKEVVPSLACEWSQLTLSGLNGAQMEKIPLLHISSCD | |
| | QNISEKDLLDTENKRKKDFLTSENSLPRISSLPKSEKPLNEETVVNKRDEEQHLESHTDCILAVKQAISG | |
| | TSPVASSFQGIKKSIFRIRESPKETFNASFSGHMTDPNFKKETEASESGLEIHTVCSQKEDSLCPNLIDN | |
| | GSWPATTTQNSVALKNAGLISTLKKKTNKFIYAIHDETSYKGKKIPKDQKSELINCSAQFEANAFEAPLT | |
| | FANADSGLLHSSVKRSCSQNDSEEPTLSLTSSFGTILRKCSRNETCSNNTVISQDLDYKEAKCNKEKLQL | |
| | FITPEADSLSCLQEGQCENDPKSKKVSDIKEEVLAAACHPVQHSKVEYSDTDFQSQKSLLYDHENASTLI | |
| | LTPTSKDVLSNLVMISRGKESYKMSDKLKGNNYESDVELTKNIPMEKNQDVCALNENYKNVELLPPEKYM | |
| | RVASPSRKVQFNQNTNLRVIQKNQEETTSISKITVNPDSEELFSDNENNFVFQVANERNNLALGNTKELH | |
| | ETDLTCVNEPIFKNSTMVLYGDTGDKQATQVSIKKDLVYVLAEENKNSVKQHIKMTLGQDLKSDISLNID | |
| | KIPEKNNDYMNKWAGLLGPISNHSFGGSFRTASNKEIKLSEHNIKKSKMFFKDIEEQYPTSLACVEIVNT | |
| | LALDNQKKLSKPQSINTVSAHLQSSVVVSDCKNSHITPQMLFSKQDFNSNHNLTPSQKAEITELSTILEE | |
| | SGSQFEFTQFRKPSYILQKSTFEVPENQMTILKTTSEECRDADLHVIMNAPSIGQVDSSKQFEGTVEIKR | |
| | KFAGLLKNDCNKSASGYLTDENEVGFRGFYSAHGTKLNVSTEALQKAVKLFSDIENISEETSAEVHPISL | |
| | SSSKCHDSVVSMFKIENHNDKTVSEKNNKCQLILQNNIEMTTGTFVEEITENYKRNTENEDNKYTAASRN | |
| | SHNLEFDGSDSSKNDTVCIHKDETDLLFTDQHNICLKLSGQFMKEGNTQIKEDLSDLTFLEVAKAQEACH | |
| | GNTSNKEQLTATKTEQNIKDFETSDTFFQTASGKNISVAKESFNKIVNFFDQKPEELHNFSLNSELHSDI | |
| | RKNKMDILSYEETDIVKHKILKESVPVGTGNQLVTFQGQPERDEKIKEPTLLGFHTASGKKVKIAKESLD | |
| | KVKNLFDEKEQGTSEITSFSHQWAKTLKYREACKDLELACETIEITAAPKCKEMQNSLNNDKNLVSIETV | |
| | VPPKLLSDNLCRQTENLKTSKSIFLKVKVHENVEKETAKSPATCYTNQSPYSVIENSALAFYTSCSRKTS | |
| | VSQTSLLEAKKWLREGIFDGQPERINTADYVGNYLYENNSNSTIAENDKNHLSEKQDTYLSNSSMSNSYS | |
| | YHSDEVYNDSGYLSKNKLDSGIEPVLKNVEDQKNTSFSKVISNVKDANAYPQTVNEDICVEELVTSSSPC | |
| | KNKNAAIKLSISNSNNFEVGPPAFRIASGKIVCVSHETIKKVKDIFTDSFSKVIKENNENKSKICQTKIM | |
| | AGCYEALDDSEDILHNSLDNDECSTHSHKVFADIQSEEILQHNQNMSGLEKVSKISPCDVSLETSDICKC | |
| | SIGKLHKSVSSANTCGIFSTASGKSVQVSDASLQNARQVFSEIEDSTKQVFSKVLFKSNEHSDQLTREEN | |
| | TAIRTPEHLISQKGFSYNVVNSSAFSGFSTASGKQVSILESSLHKVKGVLEEFDLIRTEHSLHYSPTSRQ | |
| | NVSKILPRVDKRNPEHCVNSEMEKTCSKEFKLSNNLNVEGGSSENNHSIKVSPYLSQFQQDKQQLVLGTK | |
| | VSLVENIHVLGKEQASPKNVKMEIGKTETFSDVPVKTNIEVCSTYSKDSENYFETEAVEIAKAFMEDDEL | |
| | TDSKLPSHATHSLFTCPENEEMVLSNSRIGKRRGEPLILVGEPSIKRNLLNEFDRIIENQEKSLKASKST | |
| | PDGTIKDRRLFMHHVSLEPITCVPFRTTKERQEIQNPNFTAPGQEFLSKSHLYEHLTLEKSSSNLAVSGH | |
| | PFYQVSATRNEKMRHLITTGRPTKVFVPPFKTKSHFHRVEQCVRNINLEENRQKQNIDGHGSDDSKNKIN | |
| | DNEIHQFNKNNSNQAVAVTFTKCEEEPLDLITSLQNARDIQDMRIKKKQRQRVFPQPGSLYLAKTSTLPR | |
| | ISLKAAVGGQVPSACSHKQLYTYGVSKHCIKINSKNAESFQFHTEDYFGKESLWTGKGIQLADGGWLIPS | |
| | NDGKAGKEEFYRALCDTPGVDPKLISRIWVYNHYRWIIWKLAAMECAFPKEFANRCLSPERVLLQLKYRY | |
| | DTEIDRSRRSAIKKIMERDDTAAKTLVLCVSDIISLSANISETSSNKTSSADTQKVAIIELTDGWYAVKA | |
| | QLDPPLLAVLKNGRLTVGQKIILHGAELVGSPDACTPLEAPESLMLKISANSTRPARWYTKLGFFPDPRP | |
| | FPLPLSSLFSDGGNVGCVDVIIQRAYPIQWMEKTSSGLYIFRNEREEEKEAAKYVEAQQKRLEALFTKIQ | |
| | EEFEEHEENTTKPYLPSRALTRQQVRALQDGAELYEAVKNAADPAYLEGYFSEEQLRALNNHRQMLNDKK | |
| | QAQIQLEIRKAMESAEQKEQGLSRDVTTVWKLRIVSYSKKEKDSVILSIWRPSSDLYSLLTEGKRYRIYH | |
| | LATSKSKSKSERANIQLAATKKTQYQQLPVSDEILFQIYQPREPLHFSKFLDPDFQPSCSEVDLIGFVVS | |
| | VVKKTGLAPFVYLSDECYNLLAIKFWIDLNEDIIKPHMLIAASNLQWRPESKSGLLTLFAGDFSVFSASP | |
| | KEGHFQETFNKMKNTVENIDILCNEAENKLMHILHANDPKWSTPTKDCTSGPYTAQIIPGTGNKLLMSSP | |
| | NCEIYYQSPLSLCMAKRKSVSTPVSAQMTSKSCKGEKEIDDQKNCKKRRALDFLSRLPLPPPVSPICTFV | |
| | SPAAQKAFQPPRSCGTKYETPIKKKELNSPQMTPFKKFNEISLLESNSIADEELALINTQALLSGSTGEK | |
| | QFISVSESTRTAPTSSEDYLRLKRRCTTSLIKEQESSQASTEECEKNKQDTITTKKYI (breast | |
| | cancer 2, early onset, isoform CRA_c [Homo sapiens] CCDS 9344.1) | |
| BRCA1 | MDLSALRVEEVQNVINAMQKILECPICLELIKEPVSTKCDHIFCKFCMLKLLNQKKGPSQCPLCKNDITK | 16305- |
| | RSLQESTRFSQLVEELLKIICAFQLDTGLEYANSYNFAKKENNSPEHLKDEVSIIQSMGYRNRAKRLLQS | 16309 |
| | EPENPSLQETSLSVQLSNLGTVRTLRTKQRIQPQKTSVYIELGSDSSEDTVNKATYCSVGDQELLQITPQ | |
| | GTRDEISLDSAKKAACEFSETDVTNTEHHQPSNNDLNTTEKRAAERHPEKYQGSSVSNLHVEPCGTNTHA | |
| | SSLQHENSSLLLTKDRMNVEKAEFCNKSKQPGLARSQHNRWAGSKETCNDRRTPSTEKKVDLNADPLCER | |
| | KEWNKQKLPCSENPRDTEDVPWITLNSSIQKVNEWFSRSDELLGSDDSHDGESESNAKVADVLDVLNEVD | |
| | EYSGSSEKIDLLASDPHEALICKSERVHSKSVESNIEDKIFGKTYRKKASLPNLSHVTENLIIGAFVTEP | |
| | QIIQERPLTNKLKRKRRPTSGLHPEDFIKKADLAVQKTPEMINQGTNQTEQNGQVMNITNSGHENKTKGD | |
| | SIQNEKNPNPIESLEKESAFKTKAEPISSSISNMELELNIHNSKAPKKNRLRRKSSTRHIHALELVVSRN | |
| | LSPPNCTELQIDSCSSSEEIKKKKYNQMPVRHSRNLQLMEGKEPATGAKKSNKPNEQTSKRHDSDTFPEL | |
| | KLTNAPGSFTKCSNTSELKEFVNPSLPREEKEEKLETVKVSNNAEDPKDLMLSGERVLQTERSVESSSIS | |
| | LVPGTDYGTQESISLLEVSTLGKAKTEPNKCVSQCAAFENPKGLIHGCSKDNRNDTEGFKYPLGHEVNHS | |
| | RETSIEMEESELDAQYLQNTFKVSKRQSFAPFSNPGNAEEECATFSAHSGSLKKQSPKVTFECEQKEENQ | |
| | GKNESNIKPVQTVNITAGFPVVGQKDKPVDNAKCSIKGGSRFCLSSQFRGNETGLITPNKHGLLQNPYRI | |
| | PPLFPIKSFVKTKCKKNLLEENFEEHSMSPEREMGNENIPSTVSTISRNNIRENVFKEASSSNINEVGSS | |
| | TNEVGSSINEIGSSDENIQAELGRNRGPKLNAMLRLGVLQPEVYKQSLPGSNCKHPEIKKQEYEEVVQTV | |
| | NTDFSPYLISDNLEQPMGSSHASQVCSETPDDLLDDGEIKEDTSFAENDIKESSAVFSKSVQKGELSRSP | |
| | SPFTHTHLAQGYRRGAKKLESSEENLSSEDEELPCFQHLLFGKVNNIPSQSTRHSTVATECLSKNTEENL | |
| | LSLKNSLNDCSNQVILAKASQEHHLSEETKCSASLFSSQCSELEDLTANTNTQDPFLIGSSKQMRHQSES | |
| | QGVGLSDKELVSDDEERGTGLEENNQEEQSMDSNLGEAASGCESETSVSEDCSGLSSQSDILTTQQRDTM | |
| | QHNLIKLQQEMAELEAVLEQHGSQPSNSYPSIISDSSALEDLRNPEQSTSEKAVLTSQKSSEYPISQNPE | |
| | GLSADKFEVSADSSTSKNKEPGVERSSPSKCPSLDDRWYMHSCSGSLQNRNYPSQEELIKVVDVEEQQLE | |
| | ESGPHDLTETSYLPRQDLEGTPYLESGISLFSDDPESDPSEDRAPESARVGNIPSSTSALKVPQLKVAES | |
| | AQSPAAAHTTDTAGYNAMEESVSREKPELTASTERVNKRMSMVVSGLTPEEFMLVYKFARKHHITLTNLI | |
| | TEETTHVVMKTDAEFVCERTLKYFLGIAGGKWVVSYFWVTQSIKERKMLNEHDFEVRGDVVNGRNHQGPK | |
| | RARESQDRKIFRGLEICCYGPFTNMPTDQLEWMVQLCGASVVKELSSFTLGTGVHPIVVVQPDAWTEDNG | |
| | FHAIGQMCEAPVVTREWVLDSVALYQCQELDTYLIPQIPHSHY (breast cancer type 1 | |
| | susceptibility protein isoform 1 [Homo sapiens] CCDS 11453.1) | |
| | MLKLLNQKKGPSQCPLCKNDITKRSLQESTRFSQLVEELLKIICAFQLDTGLEYANSYNFAKKENNSPEH | |
| | LKDEVSIIQSMGYRNRAKRLLQSEPENPSLQETSLSVQLSNLGTVRTLRTKQRIQPQKTSVYIELGSDSS | |
| | EDTVNKATYCSVGDQELLQITPQGTRDEISLDSAKKAACEFSETDVTNTEHHQPSNNDLNTTEKRAAERH | |
| | PEKYQGSSVSNLHVEPCGTNTHASSLQHENSSLLLTKDRMNVEKAEFCNKSKQPGLARSQHNRWAGSKET | |
| | CNDRRTPSTEKKVDLNADPLCERKEWNKQKLPCSENPRDTEDVPWITLNSSIQKVNEWFSRSDELLGSDD | |
| | SHDGESESNAKVADVLDVLNEVDEYSGSSEKIDLLASDPHEALICKSERVHSKSVESNIEDKIFGKTYRK | |
| | KASLPNLSHVTENLIIGAFVTEPQIIQERPLTNKLKRKRRPTSGLHPEDFIKKADLAVQKTPEMINQGTN | |
| | QTEQNGQVMNITNSGHENKTKGDSIQNEKNPNPIESLEKESAFKTKAEPISSSISNMELELNIHNSKAPK | |
| | KNRLRRKSSTRHIHALELVVSRNLSPPNCTELQIDSCSSSEEIKKKKYNQMPVRHSRNLQLMEGKEPATG | |
| | AKKSNKPNEQTSKRHDSDTFPELKLTNAPGSFTKCSNTSELKEFVNPSLPREEKEEKLETVKVSNNAEDP | |
| | KDLMLSGERVLQTERSVESSSISLVPGTDYGTQESISLLEVSTLGKAKTEPNKCVSQCAAFENPKGLIHG | |
| | CSKDNRNDTEGFKYPLGHEVNHSRETSIEMEESELDAQYLQNTFKVSKRQSFAPFSNPGNAEEECATFSA | |
| | HSGSLKKQSPKVTFECEQKEENQGKNESNIKPVQTVNITAGFPVVGQKDKPVDNAKCSIKGGSRFCLSSQ | |
| | FRGNETGLITPNKHGLLQNPYRIPPLFPIKSFVKTKCKKNLLEENFEEHSMSPEREMGNENIPSTVSTIS | |
| | RNNIRENVFKEASSSNINEVGSSTNEVGSSINEIGSSDENIQAELGRNRGPKLNAMLRLGVLQPEVYKQS | |
| | LPGSNCKHPEIKKQEYEEVVQTVNTDFSPYLISDNLEQPMGSSHASQVCSETPDDLLDDGEIKEDTSFAE | |
| | NDIKESSAVFSKSVQKGELSRSPSPFTHTHLAQGYRRGAKKLESSEENLSSEDEELPCFQHLLFGKVNNI | |
| | PSQSTRHSTVATECLSKNTEENLLSLKNSLNDCSNQVILAKASQEHHLSEETKCSASLFSSQCSELEDLT | |
| | ANTNTQDPFLIGSSKQMRHQSESQGVGLSDKELVSDDEERGTGLEENNQEEQSMDSNLGEAASGCESETS | |
| | VSEDCSGLSSQSDILTTQQRDTMQHNLIKLQQEMAELEAVLEQHGSQPSNSYPSIISDSSALEDLRNPEQ | |
| | STSEKAVLTSQKSSEYPISQNPEGLSADKFEVSADSSTSKNKEPGVERSSPSKCPSLDDRWYMHSCSGSL | |
| | QNRNYPSQEELIKVVDVEEQQLEESGPHDLTETSYLPRQDLEGTPYLESGISLFSDDPESDPSEDRAPES | |
| | ARVGNIPSSTSALKVPQLKVAESAQSPAAAHTTDTAGYNAMEESVSREKPELTASTERVNKRMSMVVSGL | |
| | TPEEFMLVYKFARKHHITLTNLITEETTHVVMKTDAEFVCERTLKYFLGIAGGKWVVSYFWVTQSIKERK | |
| | MLNEHDFEVRGDVVNGRNHQGPKRARESQDRKIFRGLEICCYGPFTNMPTDQLEWMVQLCGASVVKELSS | |
| | FTLGTGVHPIVVVQPDAWTEDNGFHAIGQMCEAPVVTREWVLDSVALYQCQELDTYLIPQIPHSHY | |
| | (breast cancer type 1 susceptibility protein isoform 2 [Homo sapiens] | |
| | CCDS 11459.2) | |
| | MDLSALRVEEVQNVINAMQKILECPICLELIKEPVSTKCDHIFCKFCMLKLLNQKKGPSQCPLCKNDITK | |
| | RSLQESTRFSQLVEELLKIICAFQLDTGLEYANSYNFAKKENNSPEHLKDEVSIIQSMGYRNRAKRLLQS | |
| | EPENPSLQETSLSVQLSNLGTVRTLRTKQRIQPQKTSVYIELGSDSSEDTVNKATYCSVGDQELLQITPQ | |
| | GTRDEISLDSAKKAACEFSETDVTNTEHHQPSNNDLNTTEKRAAERHPEKYQGSSVSNLHVEPCGTNTHA | |
| | SSLQHENSSLLLTKDRMNVEKAEFCNKSKQPGLARSQHNRWAGSKETCNDRRTPSTEKKVDLNADPLCER | |
| | KEWNKQKLPCSENPRDTEDVPWITLNSSIQKVNEWFSRSDELLGSDDSHDGESESNAKVADVLDVLNEVD | |
| | EYSGSSEKIDLLASDPHEALICKSERVHSKSVESNIEDKIFGKTYRKKASLPNLSHVTENLIIGAFVTEP | |
| | QIIQERPLTNKLKRKRRPTSGLHPEDFIKKADLAVQKTPEMINQGTNQTEQNGQVMNITNSGHENKTKGD | |
| | SIQNEKNPNPIESLEKESAFKTKAEPISSSISNMELELNIHNSKAPKKNRLRRKSSTRHIHALELVVSRN | |
| | LSPPNCTELQIDSCSSSEEIKKKKYNQMPVRHSRNLQLMEGKEPATGAKKSNKPNEQTSKRHDSDTFPEL | |
| | KLTNAPGSFTKCSNTSELKEFVNPSLPREEKEEKLETVKVSNNAEDPKDLMLSGERVLQTERSVESSSIS | |
| | LVPGTDYGTQESISLLEVSTLGKAKTEPNKCVSQCAAFENPKGLIHGCSKDNRNDTEGFKYPLGHEVNHS | |
| | RETSIEMEESELDAQYLQNTFKVSKRQSFAPFSNPGNAEEECATFSAHSGSLKKQSPKVTFECEQKEENQ | |
| | GKNESNIKPVQTVNITAGFPVVGQKDKPVDNAKCSIKGGSRFCLSSQFRGNETGLITPNKHGLLQNPYRI | |
| | PPLFPIKSFVKTKCKKNLLEENFEEHSMSPEREMGNENIPSTVSTISRNNIRENVFKEASSSNINEVGSS | |
| | TNEVGSSINEIGSSDENIQAELGRNRGPKLNAMLRLGVLQPEVYKQSLPGSNCKHPEIKKQEYEEVVQTV | |
| | NTDFSPYLISDNLEQPMGSSHASQVCSETPDDLLDDGEIKEDTSFAENDIKESSAVFSKSVQKGELSRSP | |
| | SPFTHTHLAQGYRRGAKKLESSEENLSSEDEELPCFQHLLFGKVNNIPSQSTRHSTVATECLSKNTEENL | |
| | LSLKNSLNDCSNQVILAKASQEHHLSEETKCSASLFSSQCSELEDLTANTNTQDPFLIGSSKQMRHQSES | |
| | QGVGLSDKELVSDDEERGTGLEENNQEEQSMDSNLGEAASGCESETSVSEDCSGLSSQSDILTTQQRDTM | |
| | QHNLIKLQQEMAELEAVLEQHGSQPSNSYPSIISDSSALEDLRNPEQSTSEKDSHIHGQRNNSMFSKRPR | |
| | EHISVLTSQKSSEYPISQNPEGLSADKFEVSADSSTSKNKEPGVERSSPSKCPSLDDRWYMHSCSGSLQN | |
| | RNYPSQEELIKVVDVEEQQLEESGPHDLTETSYLPRQDLEGTPYLESGISLFSDDPESDPSEDRAPESAR | |
| | VGNIPSSTSALKVPQLKVAESAQSPAAAHTTDTAGYNAMEESVSREKPELTASTERVNKRMSMVVSGLTP | |
| | EEFMLVYKFARKHHITLTNLITEETTHVVMKTDAEFVCERTLKYFLGIAGGKWVVSYFWVTQSIKERKML | |
| | NEHDFEVRGDVVNGRNHQGPKRARESQDRKIFRGLEICCYGPFTNMPTDQLEWMVQLCGASVVKELSSFT | |
| | LGTGVHPIVVVQPDAWTEDNGFHAIGQMCEAPVVTREWVLDSVALYQCQELDTYLIPQIPHSHY | |
| | (breast cancer type 1 susceptibility protein isoform 2 [Homo sapiens], | |
| | CCDS 11456.2) | |
| | MDLSALRVEEVQNVINAMQKILECPICLELIKEPVSTKCDHIFCKFCMLKLLNQKKGPSQCPLCKNDITK | |
| | RSLQESTRFSQLVEELLKIICAFQLDTGLEYANSYNFAKKENNSPEHLKDEVSIIQSMGYRNRAKRLLQS | |
| | EPENPSLQETSLSVQLSNLGTVRTLRTKQRIQPQKTSVYIELGSDSSEDTVNKATYCSVGDQELLQITPQ | |
| | GTRDEISLDSAKKAACEFSETDVTNTEHHQPSNNDLNTTEKRAAERHPEKYQGEAASGCESETSVSEDCS | |
| | GLSSQSDILTTQQRDTMQHNLIKLQQEMAELEAVLEQHGSQPSNSYPSIISDSSALEDLRNPEQSTSEKV | |
| | LTSQKSSEYPISQNPEGLSADKFEVSADSSTSKNKEPGVERSSPSKCPSLDDRWYMHSCSGSLQNRNYPS | |
| | QEELIKVVDVEEQQLEESGPHDLTETSYLPRQDLEGTPYLESGISLFSDDPESDPSEDRAPESARVGNIP | |
| | SSTSALKVPQLKVAESAQSPAAAHTTDTAGYNAMEESVSREKPELTASTERVNKRMSMVVSGLTPEEFML | |
| | VYKFARKHHITLTNLITEETTHVVMKTDAEFVCERTLKYFLGIAGGKWVVSYFWVTQSIKERKMLNEHDF | |
| | EVRGDVVNGRNHQGPKRARESQDRKIFRGLEICCYGPFTNMPTDQLEWMVQLCGASVVKELSSFTLGTGV | |
| | HPIVVVQPDAWTEDNGFHAIGQMCEAPVVTREWVLDSVALYQCQELDTYLIPQIPHSHY (breast | |
| | cancer type 1 susceptibility protein isoform 2 [Homo sapiens] CCDS | |
| | 11454.2) | |
| | MDLSALRVEEVQNVINAMQKILECPICLELIKEPVSTKCDHIFCKFCMLKLLNQKKGPSQCPLCKNDITK | |
| | RSLQESTRFSQLVEELLKIICAFQLDTGLEYANSYNFAKKENNSPEHLKDEVSIIQSMGYRNRAKRLLQS | |
| | EPENPSLQETSLSVQLSNLGTVRTLRTKQRIQPQKTSVYIELGSDSSEDTVNKATYCSVGDQELLQITPQ | |
| | GTRDEISLDSAKKAACEFSETDVTNTEHHQPSNNDLNTTEKRAAERHPEKYQGEAASGCESETSVSEDCS | |
| | GLSSQSDILTTQQRDTMQHNLIKLQQEMAELEAVLEQHGSQPSNSYPSIISDSSALEDLRNPEQSTSEKV | |
| | LTSQKSSEYPISQNPEGLSADKFEVSADSSTSKNKEPGVERSSPSKCPSLDDRWYMHSCSGSLQNRNYPS | |
| | QEELIKVVDVEEQQLEESGPHDLTETSYLPRQDLEGTPYLESGISLFSDDPESDPSEDRAPESARVGNIP | |
| | SSTSALKVPQLKVAESAQSPAAAHTTDTAGYNAMEESVSREKPELTASTERVNKRMSMVVSGLTPEEFML | |
| | VYKFARKHHITLTNLITEETTHVVMKTDAEFVCERTLKYFLGIAGGKWVVSYFWVTQSIKERKMLNEHDF | |
| | EVRGDVVNGRNHQGPKRARESQDRKIFRGLEICCYGPFTNMPTGCPPNCGCAARCLDRGQWLPCNWADV | |
| | (breast cancer type 1 susceptibility protein isoform 2 [Homo sapiens] | |
| | CCDS 11455.2) | |
| RAD51 | MAMQMQLEANADTSVEEESFGPQPISRLEQCGINANDVKKLEEAGFHTVEAVAYAPKKELINIKGISEAK | 16310- |
| | ADKILAEAAKLVPMGFTTATEFHQRRSEIIQITTGSKELDKLLQGGIETGSITEMFGEFRTGKTQICHTL | 16312 |
| | AVTCQLPIDRGGGEGKAMYIDTEGTFRPERLLAVAERYGLSGSDVLDNVAYARAFNTDHQTQLLYQASAM | |
| | MVESRYALLIVDSATALYRTDYSGRGELSARQMHLARFLRMLLRLADEFGVAVVITNQVVAQVDGAAMFA | |
| | ADPKKPIGGNIIAHASTTRLYLRKGRGETRICKIYDSPCLPEAEAMFAINADGVGDAKD (RAD51 | |
| | [Homo sapiens], CCDS 10062.1) | |
| | MAMQMQLEANADTSVEEESFGPQPISRLEQCGINANDVKKLEEAGFHTVEAVAYAPKKELINIKGISEAK | |
| | ADKILTESRSVARLECNSVILVYCTLRLSGSSDSPASASRVVGTTGGIETGSITEMFGEFRTGKTQICHT | |
| | LAVTCQLPIDRGGGEGKAMYIDTEGTFRPERLLAVAERYGLSGSDVLDNVAYARAFNTDHQTQLLYQASA | |
| | MMVESRYALLIVDSATALYRTDYSGRGELSARQMHLARFLRMLLRLADEFGVAVVITNQVVAQVDGAAMF | |
| | AADPKKPIGGNIIAHASTTRLYLRKGRGETRICKIYDSPCLPEAEAMFAINADGVGDAKD (RAD51 | |
| | [Homo sapiens], CCDS 53931.1) | |
| | MAMQMQLEANADTSVEEESFGPQPISRLEQCGINANDVKKLEEAGFHTVEAVAYAPKKELINIKGISEAK | |
| | ADKILAEAAKLVPMGFTTATEFHQRRSEIIQITTGSKELDKLLQGGIETGSITEMFGEFRTGKTQICHTL | |
| | AVTCQLPIDRGGGEGKAMYIDTEGTFRPERLLAVAERYGLSGSDVLDNVAYARAFNTDHQTQLLYQASAM | |
| | MVESRYALLIVDSATALYRTDYSGRGELSARQMHLARFLRMLLRLADEIVSEERKRGNQNLQNLRLSLSS | |
| | (CCDS 53932.1) | |

[0967] In certain embodiments of the methods provided herein, the frequency of preferred repair outcomes generated using a Cas9 molecule described herein may be increased by modulating (e.g., stimulating or overexpressing) a component (e.g., exactly one component, or one or more components, e.g., two or three components) of a gene conversion pathway, e.g., a BRCA1, BRCA2 and/or RAD51. In some embodiments, the frequency of gene conversion resulting from a Cas9 nuclease (e.g., wild type Cas9 nuclease) induced-lesion in a target position of a target cell overexpressing a gene conversion pathway component is increased at least about 1-fold, at least about 2-fold, at least about 3-fold, at least about 4-fold, at least about 5-fold, at least about 6-fold, at least about 7-fold, at least about 8-fold, at least about 9-fold, at least about 10-fold, or more, as compared to the frequency of gene conversion resulting from a Cas9 nickase (e.g., a Cas9 D10A nickase) induced-lesion in a target position in the absence of overexpression of a gene conversion pathway.

[0968] In some embodiments, the frequency of gene conversion resulting from a Cas9 nuclease (e.g., wild type Cas9 nuclease) induced-lesion in a target position of a target cell overexpressing a gene conversion pathway component is increased at least 5% (e.g., at least about 5%, at least about 10%, at least about 15%, at least about 20%, at least about 25%, at least about 30%, at least about 35%, at least about 40%, at least about 45%, at least about 50%, at least about 55%, at least about 60%, at least about 65%, at least about 70%, at least about 75%, at least about 80%, at least about 85%, at least about 90%, at least about 95%, at least about 100%, at least about 150%, at least about 200%, at least about 300%, at least about 400%, at least about 500%, at least about 600%, at least about 700%, at least about 800%, at least about 900%, or more, as compared to the frequency of gene conversion resulting from a Cas9 nickase (e.g., a Cas9 D10A nickase) induced-lesion in a target position in the absence of overexpression of a gene conversion pathway.

[0969] In certain embodiments of the methods provided herein, the frequency of preferred repair outcomes generated using a Cas9 molecule described herein may be increased by modulating (e.g., stimulating or overexpressing) a component (e.g., exactly one component, or one or more components, e.g., two or three components) of a gene conversion pathway, e.g., a BRCA1, BRCA2 and/or RAD51. In some embodiments, the frequency of gene conversion resulting from a Cas9 nickase (e.g., a Cas9 D10A nickase) induced-lesion in a target position of a target cell overexpressing a gene conversion pathway component is increased at least about 1-fold, at least about 2-fold, at least about 3-fold, at least about 4-fold, at least about 5-fold, at least about 6-fold, at least about 7-fold, at least about 8-fold, at least about 9-fold, at least about 10-fold, or more, as compared to the frequency of gene conversion resulting from a Cas9 nickase (e.g., a Cas9 D10A nickase) induced-lesion in a target position in the absence of overexpression of a gene conversion pathway.

[0970] In some embodiments, the frequency of gene conversion resulting from a Cas9 nickase (e.g., a Cas9 D10A nickase) induced-lesion in a target position of a target cell overexpressing a gene conversion pathway component is increased at least 5% (e.g., at least about 5%, at least about 10%, at least about 15%, at least about 20%, at least about 25%, at least about 30%, at least about 35%, at least about 40%, at least about 45%, at least about 50%, at least about 55%, at least about 60%, at least about 65%, at least about 70%, at least about 75%, at least about 80%, at least about 85%, at least about 90%, at least about 95%, at least about 100%, at least about 150%, at least about 200%, at least about 300%, at least about 400%, at least about 500%, at least about 600%, at least about 700%, at least about 800%, at least about 900%, or more, as compared to the frequency of gene conversion resulting from a Cas9 nickase (e.g., a Cas9 D10A nickase) induced-lesion in a target position in the absence of overexpression of a gene conversion pathway.

[0971] V.2 NHEJ Approaches for Gene Targeting

[0972] In certain embodiments of the methods provided herein, NHEJ-mediated deletion is used to delete all or part of a target gene. As described herein, nuclease-induced NHEJ can also be used to remove (e.g., delete) sequences in a gene of interest.

[0973] While not wishing to be bound by theory, it is believed that, in certain embodiments, the genomic alterations associated with the methods described herein rely on nuclease-induced NHEJ and the error-prone nature of the NHEJ repair pathway. NHEJ repairs a double-strand break in the DNA by joining together the two ends; however, generally, the original sequence is restored only if two compatible ends, exactly as they were formed by the double-strand break, are perfectly ligated. The DNA ends of the double-strand break are frequently the subject of enzymatic processing, resulting in the addition or removal of nucleotides, e.g., resection, at one or both strands, prior to rejoining of the ends. This results in the presence of insertion and/or deletion (indel) mutations in the DNA sequence at the site of the NHEJ repair. Two-thirds of these mutations typically alter the reading frame and, therefore, produce a non-functional protein. Additionally, mutations that maintain the reading frame, but which insert or delete a significant amount of sequence, can destroy functionality of the protein. This is locus dependent as mutations in critical functional domains are likely less tolerable than mutations in non-critical regions of the protein.

[0974] The indel mutations generated by NHEJ are unpredictable in nature; however, at a given break site certain indel sequences are favored and are over represented in the population, likely due to small regions of microhomology. The lengths of deletions can vary widely; most commonly in the 1-50 bp range, but they can easily reach greater than 100-200 bp. In some embodiments, the deletion is at least about 1, 2, 3, 4, 5, 6, 7, 8, 9, 10, 11, 12, 13, 14, 15, 16, 17, 18, 19, 20, 30, 40, 47, 50, 75, 100, 200, 300, 400, 500, 750, 1000, 2000, 3000, 4000, 5000, 6000, 7000, 8000, 9000, 10000, 15000, 20000, 25000, 30000, 40000, 50000, 60000, 70000, 80000, 90000, 100000, 200000, 300000, 400000, 500000, 600000, 700000, 800000, 900000, 1000000 or more nucleotides in length. Insertions tend to be shorter and often include short duplications of the sequence immediately surrounding the break site. However, it is possible to obtain large insertions, and in these cases, the inserted sequence has often been traced to other regions of the genome or to plasmid DNA present in the cells.

[0975] Because NHEJ is a mutagenic process, it can also be used to delete small sequence motifs as long as the generation of a specific final sequence is not required. If a double-strand break is targeted near to a short target sequence, the deletion mutations caused by the NHEJ repair often span, and therefore remove, the unwanted nucleotides. For the deletion of larger DNA segments, introducing two double-strand breaks, one on each side of the sequence, can result in NHEJ between the ends with removal of the entire intervening sequence. Both of these approaches can be used to delete specific DNA sequences; however, the error-prone nature of NHEJ may still produce indel mutations at the site of repair.

[0976] Both double-strand cleaving eaCas9 molecules and single strand, or nickase, eaCas9 molecules can be used in the methods and compositions described herein to generate NHEJ-mediated indels. NHEJ-mediated indels targeted to the gene, e.g., a coding region, e.g., an early coding region of a gene of interest can be used to knockout (i.e., eliminate expression of) a gene of interest. For example, early coding region of a gene of interest includes sequence immediately following a transcription start site, within a first exon of the coding sequence, or within 500 bp of the transcription start site (e.g., less than 500, 450, 400, 350, 300, 250, 200, 150, 100 or 50 bp).

[0977] Placement of Double-Strand or Single-Strand Breaks Relative to the Target Position

[0978] In certain embodiments, in which a gRNA and Cas9 nuclease generate a double-strand break for the purpose of inducing NHEJ-mediated indels, a gRNA, e.g., a unimolecular (or chimeric) or modular gRNA molecule, is configured to position one double-strand break in close proximity to a nucleotide of the target position. In one embodiment, the cleavage site is between 0-30 bp away from the target position (e.g., less than 30, 25, 20, 15, 10, 9, 8, 7, 6, 5, 4, 3, 2 or 1 bp from the target position).

[0979] In certain embodiments, in which two gRNAs complexing with Cas9 nickases induce two single-strand breaks for the purpose of inducing NHEJ-mediated indels, two gRNAs, e.g., independently, unimolecular (or chimeric) or modular gRNA, are configured to position two single-strand breaks to provide for NHEJ repair a nucleotide of the target position. In certain embodiments, the gRNAs are configured to position cuts at the same position, or within a few nucleotides of one another, on different strands, essentially mimicking a double-strand break. In certain embodiments, the closer nick is between 0-30 bp away from the target position (e.g., less than 30, 25, 20, 15, 10, 9, 8, 7, 6, 5, 4, 3, 2, or 1 bp from the target position), and the two nicks are within 25-55 bp of each other (e.g., between 25 to 50, 25 to 45, 25 to 40, 25 to 35, 25 to 30, 50 to 55, 45 to 55, 40 to 55, 35 to 55, 30 to 55, 30 to 50, 35 to 50, 40 to 50, 45 to 50, 35 to 45, or 40 to 45 bp) and no more than 100 bp away from each other (e.g., no more than 90, 80, 70, 60, 50, 40, 30, 20, or 10 bp). In certain embodiments, the gRNAs are configured to place a single-strand break on either side of a nucleotide of the target position.

[0980] Both double-strand cleaving eaCas9 molecules and single strand, or nickase, eaCas9 molecules can be used in the methods and compositions described herein to generate breaks both sides of a target position. Double-strand or paired single-strand breaks may be generated on both sides of a target position to remove the nucleic acid sequence between the two cuts (e.g., the region between the two breaks in deleted). In certain embodiments, two gRNAs, e.g., independently, unimolecular (or chimeric) or modular gRNA, are configured to position a double-strand break on both sides of a target position. In other embodiments, three gRNAs, e.g., independently, unimolecular (or chimeric) or modular gRNA, are configured to position a double-strand break (i.e., one gRNA complexes with a Cas9 nuclease) and two single-strand breaks or paired single-strand breaks (i.e., two gRNAs complex with Cas9 nickases) on either side of the target position. In certain embodiments, four gRNAs, e.g., independently, unimolecular (or chimeric) or modular gRNA, are configured to generate two pairs of single-strand breaks (i.e., two pairs of two gRNAs complex with Cas9 nickases) on either side of the target position. The double-strand break(s) or the closer of the two single-strand nicks in a pair will ideally be within 0-500 bp of the target position (e.g., no more than 450, 400, 350, 300, 250, 200, 150, 100, 50, or 25 bp from the target position). When nickases are used, the two nicks in a pair are within 25-55 bp of each other (e.g., between 25 to 50, 25 to 45, 25 to 40, 25 to 35, 25 to 30, 50 to 55, 45 to 55, 40 to 55, 35 to 55, 30 to 55, 30 to 50, 35 to 50, 40 to 50, 45 to 50, 35 to 45, or 40 to 45 bp) and no more than 100 bp away from each other (e.g., no more than 90, 80, 70, 60, 50, 40, 30, 20, or 10 bp).

[0981] V.3 Targeted Knockdown

[0982] Unlike CRISPR/Cas-mediated gene knockout, which permanently eliminates expression by mutating the gene at the DNA level, CRISPR/Cas knockdown allows for temporary reduction of gene expression through the use of artificial transcription factors. Mutating key residues in both DNA cleavage domains of the Cas9 molecule (e.g., the D10A and H840A mutations) results in the generation of a catalytically inactive Cas9 (referred to herein as “eiCas9”, which is also known as dead Cas9 or dCas9) molecule. An eiCas9 complexes with a gRNA and localizes to the DNA sequence specified by that gRNA's targeting domain, however, it does not cleave the target DNA. Fusion of the eiCas9 to an effector domain, e.g., a transcription repression domain, enables recruitment of the effector to any DNA site specified by the gRNA. Although an eiCas9 itself can block transcription when recruited to early regions in the coding sequence, more robust repression can be achieved by fusing a transcriptional repression domain (for example KRAB, SID or ERD) to the eiCas9, referred to herein as a “Cas9-repressor”, and recruiting the transcriptional repression domain to the target knockdown position, e.g., within 1000 bp of sequence 3′ of the start codon or within 500 bp of a promoter region 5′ of the start codon of a gene. It is likely that targeting DNAse I hypersensitive sites (DHSs) of the promoter may yield more efficient gene repression or activation because these regions are more likely to be accessible to the eiCas9 and are also more likely to harbor sites for endogenous transcription factors. Especially for gene repression, it is contemplated herein that blocking the binding site of an endogenous transcription factor would aid in downregulating gene expression. In certain embodiments, one or more eiCas9 molecules may be used to block binding of one or more endogenous transcription factors. In some embodiments, an eiCas9 molecule can be fused to a chromatin modifying protein. Altering chromatin status can result in decreased expression of the target gene. One or more eiCas9 molecules fused to one or more chromatin modifying proteins may be used to alter chromatin status.

[0983] In an embodiment, a gRNA molecule can be targeted to a known transcription response elements (e.g., promoters, enhancers, etc.), a known upstream activating sequences (UAS), and/or sequences of unknown or known function that are suspected of being able to control expression of the target DNA.

[0984] CRISPR/Cas-mediated gene knockdown can be used to reduce expression of an unwanted allele or transcript. Contemplated herein are scenarios wherein permanent destruction of the gene is not ideal. In these scenarios, site-specific repression may be used to temporarily reduce or eliminate expression. It is also contemplated herein that the off-target effects of a Cas9-repressor may be less severe than those of a Cas9-nuclease as a nuclease can cleave any DNA sequence and cause mutations whereas a Cas9-repressor may only have an effect if it targets the promoter region of an actively transcribed gene. However, while nuclease-mediated knockout is permanent, repression may only persist as long as the Cas9-repressor is present in the cells. Once the repressor is no longer present, it is likely that endogenous transcription factors and gene regulatory elements would restore expression to its natural state.

[0985] V.4 Single-Strand Annealing

[0986] Single-strand annealing (SSA) is another DNA repair process that repairs a double-strand break between two repeat sequences present in a target nucleic acid. Repeat sequences utilized by the SSA pathway are generally greater than 30 nucleotides in length. Resection at the break ends occurs to reveal repeat sequences on both strands of the target nucleic acid. After resection, single-strand overhangs containing the repeat sequences are coated with RPA protein to prevent the repeats sequences from inappropriate annealing, e.g., to themselves. RAD52 binds to and each of the repeat sequences on the overhangs and aligns the sequences to enable the annealing of the complementary repeat sequences. After annealing, the single-strand flaps of the overhangs are cleaved. New DNA synthesis fills in any gaps, and ligation restores the DNA duplex. As a result of the processing, the DNA sequence between the two repeats is deleted. The length of the deletion can depend on many factors including the location of the two repeats utilized, and the pathway or processivity of the resection.

[0987] In contrast to HDR pathways, SSA does not require a template nucleic acid to alter or correct a target nucleic acid sequence. Instead, the complementary repeat sequence is utilized.

### V. 5 Other DNA Repair Pathways

[0988] SSBR (Single-Strand Break Repair)

[0989] Single-stranded breaks (SSB) in the genome are repaired by the SSBR pathway, which is a distinct mechanism from the DSB repair mechanisms discussed above. The SSBR pathway has four major stages: SSB detection, DNA end processing, DNA gap filling, and DNA ligation. A more detailed explanation is given in Caldecott 2008, and a summary is given here.

[0990] In the first stage, when a SSB forms, PARP1 and/or PARP2 recognize the break and recruit repair machinery. The binding and activity of PARP1 at DNA breaks is transient and it seems to accelerate SSBr by promoting the focal accumulation or stability of SSBr protein complexes at the lesion. Arguably the most important of these SSBr proteins is XRCC1, which functions as a molecular scaffold that interacts with, stabilizes, and stimulates multiple enzymatic components of the SSBr process including the protein responsible for cleaning the DNA 3′ and 5′ ends. For instance, XRCC1 interacts with several proteins (DNA polymerase beta, PNK, and three nucleases, APE1, APTX, and APLF) that promote end processing. APE1 has endonuclease activity. APLF exhibits endonuclease and 3′ to 5′ exonuclease activities. APTX has endonuclease and 3′ to 5′ exonuclease activity.

[0991] This end processing is an important stage of SSBR since the 3′- and/or 5′-termini of most, if not all, SSBs are damaged. End processing generally involves restoring a damaged 3′-end to a hydroxylated state and and/or a damaged 5′ end to a phosphate moiety, so that the ends become ligation-competent. Enzymes that can process damaged 3′ termini include PNKP, APE1, and TDP1. Enzymes that can process damaged 5′ termini include PNKP, DNA polymerase beta, and APTX. LIG3 (DNA ligase III) can also participate in end processing. Once the ends are cleaned, gap filling can occur.

[0992] At the DNA gap filling stage, the proteins typically present are PARP1, DNA polymerase beta, XRCC1, FEN1 (flap endonuclease 1), DNA polymerase delta/epsilon, PCNA, and LIG1. There are two ways of gap filling, the short patch repair and the long patch repair. Short patch repair involves the insertion of a single nucleotide that is missing. At some SSBs, “gap filling” might continue displacing two or more nucleotides (displacement of up to 12 bases have been reported). FEN1 is an endonuclease that removes the displaced 5′-residues. Multiple DNA polymerases, including Polβ, are involved in the repair of SSBs, with the choice of DNA polymerase influenced by the source and type of SSB.

[0993] In the fourth stage, a DNA ligase such as LIG1 (Ligase I) or LIG3 (Ligase III) catalyzes joining of the ends. Short patch repair uses Ligase III and long patch repair uses Ligase I.

[0994] Sometimes, SSBR is replication-coupled. This pathway can involve one or more of CtIP, MRN, ERCC1, and FEN1. Additional factors that may promote SSBR include: aPARP, PARP1, PARP2, PARG, XRCC1, DNA polymerase β, DNA polymerase delta, DNA polymerase epsilon, PCNA, LIG1, PNK, PNKP, APE1, APTX, APLF, TDP1, LIG3, FEN1, CtIP, MRN, and ERCC1.

[0995] MMR (Mismatch Repair)

[0996] Cells contain three excision repair pathways: MMR, BER, and NER. The excision repair pathways have a common feature in that they typically recognize a lesion on one strand of the DNA, then exo/endonucleases remove the lesion and leave a 1-30 nucleotide gap that is sub-sequentially filled in by DNA polymerase and finally sealed with ligase. A more complete picture is given in Li 2008, and a summary is provided here.

[0997] Mismatch repair (MMR) operates on mispaired DNA bases.

[0998] The MSH2/6 or MSH2/3 complexes both have ATPase activity that plays an important role in mismatch recognition and the initiation of repair. MSH2/6 preferentially recognizes base-base mismatches and identifies mispairs of 1 or 2 nucleotides, while MSH2/3 preferentially recognizes larger ID mispairs.

[0999] hMLH1 heterodimerizes with hPMS2 to form hMutLα which possesses an ATPase activity and is important for multiple steps of MMR. It possesses a PCNA/replication factor C (RFC)-dependent endonuclease activity which plays an important role in 3′ nick-directed MMR involving EXO1 (EXO1 is a participant in both HR and MMR). It regulates termination of mismatch-provoked excision. Ligase I is the relevant ligase for this pathway. Additional factors that may promote MMR include: EXO1, MSH2, MSH3, MSH6, MLH1, PMS2, MLH3, DNA Pol delta, RPA, HMGB1, RFC, and DNA ligase I.

[1000] Base Excision Repair (BER)

[1001] The base excision repair (BER) pathway is active throughout the cell cycle; it is responsible primarily for removing small, non-helix-distorting base lesions from the genome. In contrast, the related Nucleotide Excision Repair pathway (discussed in the next section) repairs bulky helix-distorting lesions. A more detailed explanation is given in Caldecott 2008, and a summary is given here.

[1002] Upon DNA base damage, base excision repair (BER) is initiated and the process can be simplified into five major steps: (a) removal of the damaged DNA base; (b) incision of the subsequent a basic site; (c) clean-up of the DNA ends; (d) insertion of the desired nucleotide into the repair gap; and (e) ligation of the remaining nick in the DNA backbone. These last steps are similar to the SSBR.

[1003] In the first step, a damage-specific DNA glycosylase excises the damaged base through cleavage of the N-glycosidic bond linking the base to the sugar phosphate backbone. Then AP endonuclease-1 (APE1) or bifunctional DNA glycosylases with an associated lyase activity incises the phosphodiester backbone to create a DNA single-strand break (SSB). The third step of BER involves cleaning-up of the DNA ends. The fourth step in BER is conducted by Pol β that adds a new complementary nucleotide into the repair gap and in the final step XRCC1/Ligase III seals the remaining nick in the DNA backbone. This completes the short-patch BER pathway in which the majority (˜80%) of damaged DNA bases are repaired. However, if the 5′-ends in step 3 are resistant to end processing activity, following one nucleotide insertion by Pol β there is then a polymerase switch to the replicative DNA polymerases, Pol δ/ε, which then add ˜2-8 more nucleotides into the DNA repair gap. This creates a 5′-flap structure, which is recognized and excised by flap endonuclease-1 (FEN-1) in association with the processivity factor proliferating cell nuclear antigen (PCNA). DNA ligase I then seals the remaining nick in the DNA backbone and completes long-patch BER. Additional factors that may promote the BER pathway include: DNA glycosylase, APE1, Polβ, Pol delta, Pol epsilon, XRCC1, Ligase III, FEN-1, PCNA, RECQL4, WRN, MYH, PNKP, and APTX.

[1004] Nucleotide Excision Repair (NER)

[1005] Nucleotide excision repair (NER) is an important excision mechanism that removes bulky helix-distorting lesions from DNA. Additional details about NER are given in Marteijn et al. 2014, and a summary is given here. NER a broad pathway encompassing two smaller pathways: global genomic NER (GG-NER) and transcription coupled repair NER (TC-NER). GG-NER and TC-NER use different factors for recognizing DNA damage. However, they utilize the same machinery for lesion incision, repair, and ligation.

[1006] Once damage is recognized, the cell removes a short single-stranded DNA segment that contains the lesion. Endonucleases XPF/ERCC1 and XPG (encoded by ERCC5) remove the lesion by cutting the damaged strand on either side of the lesion, resulting in a single-strand gap of 22-30 nucleotides. Next, the cell performs DNA gap filling synthesis and ligation. Involved in this process are: PCNA, RFC, DNA Pol δ, DNA Pol ε or DNA Pol κ, and DNA ligase I or XRCC1/Ligase III. Replicating cells tend to use DNA pol ε and DNA ligase I, while non-replicating cells tend to use DNA Pol δ, DNA Pol κ, and the XRCC1/Ligase III complex to perform the ligation step.

[1007] NER can involve the following factors: XPA-G, POLH, XPF, ERCC1, XPA-G, and LIG1. Transcription-coupled NER (TC-NER) can involve the following factors: CSA, CSB, XPB, XPD, XPG, ERCC1, and TTDA. Additional factors that may promote the NER repair pathway include XPA-G, POLH, XPF, ERCC1, XPA-G, LIG1, CSA, CSB, XPA, XPB, XPC, XPD, XPF, XPG, TTDA, UVSSA, USP7, CETN2, RAD23B, UV-DDB, CAK subcomplex, RPA, and PCNA.

[1008] Interstrand Crosslink (ICL)

[1009] A dedicated pathway called the ICL repair pathway repairs interstrand crosslinks. Interstrand crosslinks, or covalent crosslinks between bases in different DNA strand, can occur during replication or transcription. ICL repair involves the coordination of multiple repair processes, in particular, nucleolytic activity, translesion synthesis (TLS), and HDR. Nucleases are recruited to excise the ICL on either side of the crosslinked bases, while TLS and HDR are coordinated to repair the cut strands. ICL repair can involve the following factors: endonucleases, e.g., XPF and RAD51C, endonucleases such as RAD51, translesion polymerases, e.g., DNA polymerase zeta and Rev1, and the Fanconi anemia (FA) proteins, e.g., FancJ.

[1010] Other Pathways

[1011] Several other DNA repair pathways exist in mammals.

[1012] Translesion synthesis (TLS) is a pathway for repairing a single stranded break left after a defective replication event and involves translesion polymerases, e.g., DNA pol and Rev1.

[1013] Error-free postreplication repair (PRR) is another pathway for repairing a single stranded break left after a defective replication event.

[1014] V.6 Examples of gRNAs in Genome Editing Methods

[1015] gRNA molecules as described herein can be used with Cas9 molecules that generate a double-strand break or a single-strand break to alter the sequence of a target nucleic acid, e.g., a target position or target genetic signature. gRNA molecules useful in these methods are described below.

[1016] In certain embodiments, the gRNA, e.g., a chimeric gRNA, is configured such that it comprises one or more of the following properties;

[1017] a) it can position, e.g., when targeting a Cas9 molecule that makes double-strand breaks, a double-strand break (i) within 50, 100, 150, 200, 250, 300, 350, 400, 450, or 500 nucleotides of a target position, or (ii) sufficiently close that the target position is within the region of end resection;

[1018] b) it has a targeting domain of at least 16 nucleotides, e.g., a targeting domain of (i) 16, (ii), 17, (iii) 18, (iv) 19, (v) 20, (vi) 21, (vii) 22, (viii) 23, (ix) 24, (x) 25, or (xi) 26 nucleotides; and

[1019] (c)(i) the proximal and tail domain, when taken together, comprise at least 15, 18, 20, 25, 30, 31, 35, 40, 45, 49, 50, or 53 nucleotides, e.g., at least 15, 18, 20, 25, 30, 31, 35, 40, 45, 49, 50, or 53 nucleotides from a naturally occurring S. pyogenes or S. aureus, tail and proximal domain, or a sequence that differs by no more than 1, 2, 3, 4, 5, 6, 7, 8, 9, or 10 nucleotides therefrom;

[1020] (c)(ii) there are at least 15, 18, 20, 25, 30, 31, 35, 40, 45, 49, 50, or 53 nucleotides 3′ to the last nucleotide of the second complementarity domain, e.g., at least 15, 18, 20, 25, 30, 31, 35, 40, 45, 49, 50, or 53 nucleotides from the corresponding sequence of a naturally occurring S. pyogenes or S. aureus gRNA, or a sequence that differs by no more than 1, 2, 3, 4, 5, 6, 7, 8, 9, or 10 nucleotides therefrom;

[1021] (c)(iii) there are at least 16, 19, 21, 26, 31, 32, 36, 41, 46, 50, 51, or 54 nucleotides 3′ to the last nucleotide of the second complementarity domain that is complementary to its corresponding nucleotide of the first complementarity domain, e.g., at least 16, 19, 21, 26, 31, 32, 36, 41, 46, 50, 51, or 54 nucleotides from the corresponding sequence of a naturally occurring S. pyogenes or S. aureus gRNA, or a sequence that differs by no more than 1, 2, 3, 4, 5, 6, 7, 8, 9, or 10 nucleotides therefrom;

[1022] (c)(iv) the tail domain is at least 10, 15, 20, 25, 30, 35 or 40 nucleotides in length, e.g., it comprises at least 10, 15, 20, 25, 30, 35 or 40 nucleotides from a naturally occurring S. pyogenes or S. aureus tail domain, or a sequence that differs by no more than 1, 2, 3, 4, 5, 6, 7, 8, 9, or 10 nucleotides therefrom; or

[1023] (c)(v) the tail domain comprises 15, 20, 25, 30, 35, 40 nucleotides or all of the corresponding portions of a naturally occurring tail domain, e.g., a naturally occurring S. pyogenes or S. aureus tail domain.

[1024] In certain embodiments, the gRNA is configured such that it comprises properties a and b(i); a and b(ii); a and b(iii); a and b(iv); a and b(v); a and b(vi); a and b(vii); a and b(viii); a and b(ix); a and b(x); a and b(xi); a and c; a, b, and c; a(i), b(i), and c(i); a(i), b(i), and c(ii); a(i), b(ii), and c(i); a(i), b(ii), and c(ii); a(i), b(iii), and c(i); a(i), b(iii), and c(ii); a(i), b(iv), and c(i); a(i), b(iv), and c(ii); a(i), b(v), and c(i); a(i), b(v), and c(ii); a(i), b(vi), and c(i); a(i), b(vi), and c(ii); a(i), b(vii), and c(i); a(i), b(vii), and c(ii); a(i), b(viii), and c(i); a(i), b(viii), and c(ii); a(i), b(ix), and c(i); a(i), b(ix), and c(ii); a(i), b(x), and c(i); a(i), b(x), and c(ii); a(i), b(xi), or c(i); a(i), b(xi), and c(ii).

[1025] In certain embodiments, the gRNA, e.g., a chimeric gRNA, is configured such that it comprises one or more of the following properties:

[1026] (a) one or both of the gRNAs can position, e.g., when targeting a Cas9 molecule that makes single-strand breaks, a single-strand break within (i) 50, 100, 150, 200, 250, 300, 350, 400, 450, or 500 nucleotides of a target position, or (ii) sufficiently close that the target position is within the region of end resection;

[1027] (b) one or both have a targeting domain of at least 16 nucleotides, e.g., a targeting domain of (i) 16, (ii), 17, (iii) 18, (iv) 19, (v) 20, (vi) 21, (vii) 22, (viii) 23, (ix) 24, (x) 25, or (xi) 26 nucleotides; and

[1028] (c)(i) the proximal and tail domain, when taken together, comprise at least 15, 18, 20, 25, 30, 31, 35, 40, 45, 49, 50, or 53 nucleotides, e.g., at least 15, 18, 20, 25, 30, 31, 35, 40, 45, 49, 50, or 53 nucleotides from a naturally occurring S. pyogenes or S. aureus tail and proximal domain, or a sequence that differs by no more than 1, 2, 3, 4, 5, 6, 7, 8, 9, or 10 nucleotides therefrom;

[1029] (c)(ii) there are at least 15, 18, 20, 25, 30, 31, 35, 40, 45, 49, 50, or 53 nucleotides 3′ to the last nucleotide of the second complementarity domain, e.g., at least 15, 18, 20, 25, 30, 31, 35, 40, 45, 49, 50, or 53 nucleotides from the corresponding sequence of a naturally occurring S. pyogenes, or S. aureus gRNA, or a sequence that differs by no more than 1, 2, 3, 4, 5, 6, 7, 8, 9, or 10 nucleotides therefrom;

[1030] (c)(iii) there are at least 16, 19, 21, 26, 31, 32, 36, 41, 46, 50, 51, or 54 nucleotides 3′ to the last nucleotide of the second complementarity domain that is complementary to its corresponding nucleotide of the first complementarity domain, e.g., at least 16, 19, 21, 26, 31, 32, 36, 41, 46, 50, 51, or 54 nucleotides from the corresponding sequence of a naturally occurring S. pyogenes or S. aureus gRNA, or a sequence that differs by no more than 1, 2, 3, 4, 5, 6, 7, 8, 9, or 10 nucleotides therefrom;

[1031] (c)(iv) the tail domain is at least 10, 15, 20, 25, 30, 35 or 40 nucleotides in length, e.g., it comprises at least 10, 15, 20, 25, 30, 35 or 40 nucleotides from a naturally occurring S. pyogenes, or S. aureus tail domain, or a sequence that differs by no more than 1, 2, 3, 4, 5, 6, 7, 8, 9, or 10 nucleotides therefrom; or
[1032] (c)(v) the tail domain comprises 15, 20, 25, 30, 35, 40 nucleotides or all of the corresponding portions of a naturally occurring tail domain, e.g., a naturally occurring S. pyogenes or S. aureus tail domain.

[1033] In certain embodiments, the gRNA is configured such that it comprises properties: a and b(i); a and b(ii); a and b(iii); a and b(iv); a and b(v); a and b(vi); a and b(vii); a and b(viii); a and b(ix); a and b(x); a and b(xi); a and c; a, b, and c; a(i), b(i), and c(i); a(i), b(i), and c(ii); a(i), b(ii), and c(i); a(i), b(ii), and c(ii); a(i), b(iii), and c(i); a(i), b(iii), and c(ii); a(i), b(iv), and c(i); a(i), b(iv), and c(ii); a(i), b(v), and c(i); a(i), b(v), and c(ii); a(i), b(vi), and c(i); a(i), b(vi), and c(ii); a(i), b(vii), and c(i); a(i), b(vii), and c(ii); a(i), b(viii), and c(i); a(i), b(viii), and c(ii); a(i), b(ix), and c(i); a(i), b(ix), and c(ii); a(i), b(x), and c(i); a(i), b(x), and c(ii); a(i), b(xi), and c(i); or a(i), b(xi), and c(ii).

[1034] In certain embodiments, the gRNA is used with a Cas9 nickase molecule having HNH activity, e.g., a Cas9 molecule having the RuvC activity inactivated, e.g., a Cas9 molecule having a mutation at D10, e.g., the D10A mutation.

[1035] In an embodiment, the gRNA is used with a Cas9 nickase molecule having RuvC activity, e.g., a Cas9 molecule having the HNH activity inactivated, e.g., a Cas9 molecule having a mutation at 840, e.g., the H840A.

[1036] In an embodiment, the gRNAs are used with a Cas9 nickase molecule having RuvC activity, e.g., a Cas9 molecule having the HNH activity inactivated, e.g., a Cas9 molecule having a mutation at N863, e.g., the N863A mutation.

[1037] In embodiment, a pair of gRNAs, e.g., a pair of chimeric gRNAs, comprising a first and a second gRNA, is configured such that they comprises one or more of the following properties:

[1038] a) one or both of the gRNA molecules can position, e.g., when targeting a Cas9 molecule that makes single-strand breaks, a single-strand break within (i) 50, 100, 150, 200, 250, 300, 350, 400, 450, or 500 nucleotides of a target position, or (ii) sufficiently close that the target position is within the region of end resection;

[1039] b) one or both have a targeting domain of at least 16 nucleotides, e.g., a targeting domain of (i) 16, (ii), 17, (iii) 18, (iv) 19, (v) 20, (vi) 21, (vii) 22, (viii) 23, (ix) 24, (x) 25, or (xi) 26 nucleotides;

[1040] (c)(i) the proximal and tail domain, when taken together, comprise at least 15, 18, 20, 25, 30, 31, 35, 40, 45, 49, 50, or 53 nucleotides, e.g., at least 15, 18, 20, 25, 30, 31, 35, 40, 45, 49, 50, or 53 nucleotides from a naturally occurring S. pyogenes or S. aureus tail and proximal domain, or a sequence that differs by no more than 1, 2, 3, 4, 5, 6, 7, 8, 9, or 10 nucleotides therefrom;

[1041] (c)(ii) there are at least 15, 18, 20, 25, 30, 31, 35, 40, 45, 49, 50, or 53 nucleotides 3′ to the last nucleotide of the second complementarity domain, e.g., at least 15, 18, 20, 25, 30, 31, 35, 40, 45, 49, 50, or 53 nucleotides from the corresponding sequence of a naturally occurring S. pyogenes or S. aureus gRNA, or a sequence that differs by no more than 1, 2, 3, 4, 5, 6, 7, 8, 9, or 10 nucleotides therefrom;

[1042] (c)(iii) there are at least 16, 19, 21, 26, 31, 32, 36, 41, 46, 50, 51, or 54 nucleotides 3′ to the last nucleotide of the second complementarity domain that is complementary to its corresponding nucleotide of the first complementarity domain, e.g., at least 16, 19, 21, 26, 31, 32, 36, 41, 46, 50, 51, or 54 nucleotides from the corresponding sequence of a naturally occurring S. pyogenes or S. aureus gRNA, or a sequence that differs by no more than 1, 2, 3, 4, 5, 6, 7, 8, 9, or 10 nucleotides therefrom;

[1043] (c)(iv) the tail domain is at least 10, 15, 20, 25, 30, 35 or 40 nucleotides in length, e.g., it comprises at least 10, 15, 20, 25, 30, 35 or 40 nucleotides from a naturally occurring S. pyogenes or S. aureus tail domain; or, or a sequence that differs by no more than 1, 2, 3, 4, 5, 6, 7, 8, 9, or 10 nucleotides therefrom; or

[1044] (c)(v) the tail domain comprises 15, 20, 25, 30, 35, or 40 nucleotides or all of the corresponding portions of a naturally occurring tail domain, e.g., a naturally occurring S. pyogenes or S. aureus tail domain;

[1045] (d) the gRNAs are configured such that, when hybridized to target nucleic acid, they are separated by 0-50, 0-100, 0-200, at least 10, at least 20, at least 30 or at least 50 nucleotides;

[1046] (e) the breaks made by the first gRNA and second gRNA are on different strands; and

[1047] (f) the PAMs are facing outwards.

[1048] In certain embodiments, one or both of the gRNAs is configured such that it comprises properties a and b(i); a and b(ii); a and b(iii); a and b(iv); a and b(v); a and b(vi); a and b(vii); a and b(viii); a and b(ix); a and b(x); a and b(xi); a and c; a, b, and c; a(i), b(i), and c(i); a(i), b(i), and c(ii); a(i), b(i), c, and d; a(i), b(i), c, and e; a(i), b(i), c, d, and e; a(i), b(ii), and c(i); a(i), b(ii), and c(ii); a(i), b(ii), c, and d; a(i), b(ii), c, and e; a(i), b(ii), c, d, and e; a(i), b(iii), and c(i); a(i), b(iii), and c(ii); a(i), b(iii), c, and d; a(i), b(iii), c, and e; a(i), b(iii), c, d, and e; a(i), b(iv), and c(i); a(i), b(iv), and c(ii); a(i), b(iv), c, and d; a(i), b(iv), c, and e; a(i), b(iv), c, d, and e; a(i), b(v), and c(i); a(i), b(v), and c(ii); a(i), b(v), c, and d; a(i), b(v), c, and e; a(i), b(v), c, d, and e; a(i), b(vi), and c(i); a(i), b(vi), and c(ii); a(i), b(vi), c, and d; a(i), b(vi), c, and e; a(i), b(vi), c, d, and e; a(i), b(vii), and c(i); a(i), b(vii), and c(ii); a(i), b(vii), c, and d; a(i), b(vii), c, and e; a(i), b(vii), c, d, and e; a(i), b(viii), and c(i); a(i), b(viii), and c(ii); a(i), b(viii), c, and d; a(i), b(viii), c, and e; a(i), b(viii), c, d, and e; a(i), b(ix), and c(i); a(i), b(ix), and c(ii); a(i), b(ix), c, and d; a(i), b(ix), c, and e; a(i), b(ix), c, d, and e; a(i), b(x), and c(i); a(i), b(x), and c(ii); a(i), b(x), c, and d; a(i), b(x), c, and e; a(i), b(x), c, d, and e; a(i), b(xi), and c(i); a(i), b(xi), and c(ii); a(i), b(xi), c, and d; a(i), b(xi), c, and e; or a(i), b(xi), c, d, and e.

[1049] In certain embodiments, the gRNAs are used with a Cas9 nickase molecule having HNH activity, e.g., a Cas9 molecule having the RuvC activity inactivated, e.g., a Cas9 molecule having a mutation at D10, e.g., the D10A mutation.

[1050] In certain embodiments, the gRNAs are used with a Cas9 nickase molecule having RuvC activity, e.g., a Cas9 molecule having the HNH activity inactivated, e.g., a Cas9 molecule having a mutation at H840, e.g., the H840A mutation.

[1051] In certain embodiments, the gRNAs are used with a Cas9 nickase molecule having RuvC activity, e.g., a Cas9 molecule having the HNH activity inactivated, e.g., a Cas9 molecule having a mutation at N863, e.g., the N863A mutation.

### VI. Target Cells

[1052] Cas9 molecules and gRNA molecules, e.g., a Cas9 molecule/gRNA molecule complex, can be used to manipulate a cell, e.g., to edit a target nucleic acid, in a wide variety of cells. Additional details on types of cells that can be manipulated may be found in the section entitled “VIIA. TARGETS: CELLS” of PCT Application WO 2015/048577, the entire contents of which are expressly incorporated herein by reference.

[1053] In certain embodiments, a cell is manipulated by editing (e.g., introducing a mutation in) a target gene (e.g., a HBB gene) as described herein. In one embodiment, a cell, or a population of cells, is manipulated by editing one or more non-coding sequences, e.g., an alteration in an intron or in a 5′ or 3′ non-translated or non-transcribed region. In one embodiment, a cell, or a population of cells, is manipulated by editing the sequence of a control element, e.g., a promoter, enhancer, or a cis-acting or trans-acting control element. In one embodiment, a cell, or a population of cells, is manipulated by editing one or more coding sequences, e.g., an alteration in an exon. In some embodiments, a cell, or a population of cells, is manipulated in vitro. In other embodiments, a cell, or a population of cells, is manipulated ex vivo. In some embodiments, a cell, or a population of cells, is manipulated in vivo. In some embodiments, the expression of one or more target genes (e.g., one or more target genes described herein) is modulated, e.g., in vivo. In other embodiments, the expression of one or more target genes (e.g., one or more target genes described herein) is modulated, e.g., ex vivo. In other embodiments, the expression of one or more target genes (e.g., one or more target genes described herein) is modulated, e.g., in vitro.

[1054] In one embodiment, a cell, or a population of cells, is manipulated by editing (e.g., inducing a mutation in) the HBB target gene, e.g., as described herein. In one embodiment, the expression of the HBB target gene is modulated, e.g., in vivo. In another embodiment, the expression of the HBB target gene is modulated, e.g., ex vivo.

[1055] The Cas9 and gRNA molecules described herein can be delivered to a target cell. In certain embodiments, the target cell is an erythroid cell, e.g., an erythroblast. In certain embodiments, erythroid cells are preferentially targeted, e.g., at least about 90%, 95%, 96%, 97%, 98%, 99%, or 100% of the targeted cells are erythroid cells. For example, in the case of in vivo delivery, erythroid cells are preferentially targeted, and if cells are treated ex vivo and returned to the subject, erythroid cells are preferentially modified. In certain embodiments, the target cell is a circulating blood cell, e.g., a reticulocyte, megakaryocyte erythroid progenitor (MEP) cell, myeloid progenitor cell (CMP/GMP), lymphoid progenitor (LP) cell, hematopoietic stem/progenitor cell (HSC), or endothelial cell (EC). In certain embodiments, the target cell is a bone marrow cell (e.g., a reticulocyte, an erythroid cell (e.g., erythroblast), an MEP cell, myeloid progenitor cell (CMP/GMP), LP cell, erythroid progenitor (EP) cell, HSC, multipotent progenitor (MPP) cell, endothelial cell (EC), hemogenic endothelial (HE) cell, or mesenchymal stem cell). In certain embodiments, the target cell is a myeloid progenitor cell (e.g., a common myeloid progenitor (CMP) cell or granulocyte macrophage progenitor (GMP) cell). In certain embodiments, the target cell is a lymphoid progenitor cell, e.g., a common lymphoid progenitor (CLP) cell. In certain embodiments, the target cell is an erythroid progenitor cell (e.g., an MEP cell). In certain embodiments, the target cell is a hematopoietic stem/progenitor cell (e.g., a long term HSC (LT-HSC), short term HSC (ST-HSC), MPP cell, or lineage restricted progenitor (LRP) cell). In certain embodiments, the target cell is a CD34⁺ cell, CD34⁺CD90⁺ cell, CD34⁺CD38⁻ cell, CD34⁺CD90⁺CD49f⁺CD38⁻CD45RA⁻ cell, CD105⁺ cell, CD31⁺, or CD133⁺ cell, or a CD34⁺CD90⁺CD133⁺ cell. In certain embodiments, the target cell is an umbilical cord blood CD34⁺ HSPC, umbilical cord venous endothelial cell, umbilical cord arterial endothelial cell, amniotic fluid CD34⁺ cell, amniotic fluid endothelial cell, placental endothelial cell, or placental hematopoietic CD34⁺ cell. In certain embodiments, the target cell is a mobilized peripheral blood hematopoietic CD34⁺ cell (after the patient is treated with a mobilization agent, e.g., G-CSF or Plerixafor). In certain embodiments, the target cell is a peripheral blood endothelial cell.

[1056] In certain embodiments, a target cell is manipulated ex vivo by editing (e.g., inducing a mutation in) the HBB gene and/or modulating the expression of the HBB target gene, then the target cell is administered to the subject. Sources of target cells for ex vivo manipulation may include, for example, the subject's blood, cord blood, or marrow. Other sources of target cells for ex vivo manipulation may include, for example, heterologous donor blood, cord blood, or bone marrow.

[1057] In certain embodiments, an erythrocyte is removed from a subject, manipulated ex vivo as described above, and the erythrocyte is returned to the subject. In other embodiments, a hematopoietic stem cell is removed from a subject, manipulated ex vivo as described above, and the hematopoietic stem cell is returned to the subject. In certain embodiments, an erythroid progenitor cell is removed from a subject, manipulated ex vivo as described above, and the erythroid progenitor cell is returned to the subject. In certain embodiments, an myeloid progenitor cell is removed from a subject, manipulated ex vivo as described above, and the myeloid progenitor cell is returned to the subject. In certain embodiments, a hematopoietic stem/progenitor cell (HSC) is removed from a subject, manipulated ex vivo as described above, and returned to the subject. In certain embodiments, a CD34⁺ HSC is removed from a subject, manipulated ex vivo as described above, and returned to the subject.

[1058] In certain embodiments wherein modified HSCs generated ex vivo are administered to a subject without myeloablative pre-conditioning. In other embodiments, the modified HSCs are administered after mild myeloblative conditioning such that, followed engraftment, some of the hematopoietic cells are derived from the modified HSCs. In still other embodiments, the modified HSCs are administered after full myeloblation such that, following engraftment, 100% of the hematopoietic cells are derived from the modified HSCs.

[1059] A suitable cell can also include a stem cell such as, by way of example, an embryonic stem cell, induced pluripotent stem cell, hematopoietic stem cell, or hemogenic endothelial (HE) cell (precursor to both hematopoietic stem cells and endothelial cells). In certain embodiments, the cell is an induced pluripotent stem (iPS) cell or a cell derived from an iPS cell, e.g., an iPS cell generated from the subject, modified using methods disclosed herein and differentiated into a clinically relevant cell such as e.g., an erythrocyte. In an embodiment, AAV is used to transduce the target cells, e.g., the target cells described herein.

[1060] Cells produced by the methods described herein may be used immediately. Alternatively, the cells may be frozen (e.g., in liquid nitrogen) and stored for later use. The cells will usually be frozen in 10% dimethylsulfoxide (DMSO), 50% serum, 40% buffered medium, or some other such solution as is commonly used in the art to preserve cells at such freezing temperature and thawed in such a manner as commonly known in the art for thawing frozen cultured cells. Cells may also be thermostabilized for prolonged storage at 4° C.

### VII. Delivery, Formulations and Routes of Administration

[1061] The components, e.g., a Cas9 molecule and gRNA molecule (e.g., a Cas9 molecule/gRNA molecule complex), and a donor template nucleic acid, or all three, can be delivered, formulated, or administered, in a variety of forms, see, e.g., Tables 6-7. In certain embodiments, one Cas9 molecule and two or more (e.g., 2, 3, 4, or more) different gRNA molecules are delivered, e.g., by an AAV vector. In certain embodiments, the sequence encoding the Cas9 molecule and the sequence(s) encoding the two or more (e.g., 2, 3, 4, or more) different gRNA molecules are present on the same nucleic acid molecule, e.g., an AAV vector. When a Cas9 or gRNA component is delivered encoded in DNA, the DNA will typically include a control region, e.g., comprising a promoter, to effect expression. Useful promoters for Cas9 molecule sequences include CMV, SFFV, EFS, EF-1a, PGK, CAG, and CBH promoters, or a blood cell specific promoter. In an embodiment, the promoter is a constitutive promoter. In another embodiment, the promoter is a tissue specific promoter. Useful promoters for gRNAs include T7, H1, EF-1a, U6, U1, and tRNA promoters. Promoters with similar or dissimilar strengths can be selected to tune the expression of components. Sequences encoding a Cas9 molecule can comprise a nuclear localization signal (NLS), e.g., an SV40 NLS. In an embodiment, the sequence encoding a Cas9 molecule comprises at least two nuclear localization signals. In an embodiment a promoter for a Cas9 molecule or a gRNA molecule can be, independently, inducible, tissue specific, or cell specific.

[1062] Table 6 provides examples of how the components can be formulated, delivered, or administered.

TABLE 6
Elements

| | | Optional | |
|---|---|---|---|
| | | Donor | |
| Cas9 | gRNA | Template | |
| Molecule(s) | Molecule(s) | Nucleic Acid | Comments |
| DNA | DNA | DNA | In this embodiment, a Cas9 molecule, typically |
| | | | an eaCas9 molecule, and a gRNA molecule are |
| | | | transcribed from DNA. In this embodiment, |
| | | | they are encoded on separate molecules. In this |
| | | | embodiment, the donor template is provided as a |
| | | | separate DNA molecule. |
| DNA | DNA | | In this embodiment, a Cas9 molecule, typically |
| | | | an eaCas9 molecule, and a gRNA molecule are |
| | | | transcribed from DNA. In this embodiment, |
| | | | they are encoded on separate molecules. In this |
| | | | embodiment, the donor template is provided on |
| | | | the same DNA molecule that encodes the gRNA |
| | | | molecule. |
| DNA | | DNA | In this embodiment, a Cas9 molecule, typically |
| | | | an eaCas9 molecule, and a gRNA molecule are |
| | | | transcribed from DNA, here from a single |
| | | | molecule. In this embodiment, the donor |
| | | | template is provided as a separate DNA |
| | | | molecule. |
| DNA | DNA | DNA | In this embodiment, a Cas9 molecule, typically |
| | | | an eaCas9 molecule, and a gRNA molecule are |
| | | | transcribed from DNA. In this embodiment, |
| | | | they are encoded on separate molecules. In this |
| | | | embodiment, the donor template is provided on |
| | | | the same DNA molecule that encodes the Cas9 |
| | | | molecule. |
| DNA | RNA | DNA | In this embodiment, a Cas9 molecule, typically |
| | | | an eaCas9 molecule, is transcribed from DNA, |
| | | | and a gRNA molecule is provided as in vitro |
| | | | transcribed or synthesized RNA. In this |
| | | | embodiment, the donor template is provided as a |
| | | | separate DNA molecule. |
| DNA | RNA | DNA | In this embodiment, a Cas9 molecule, typically |
| | | | an eaCas9 molecule, is transcribed from DNA, |
| | | | and a gRNA molecule is provided as in vitro |
| | | | transcribed or synthesized RNA. In this |
| | | | embodiment, the donor template is provided on |
| | | | the same DNA molecule that encodes the Cas9 |
| | | | molecule. |
| mRNA | RNA | DNA | In this embodiment, a Cas9 molecule, typically |
| | | | an eaCas9 molecule, is translated from in vitro |
| | | | transcribed mRNA, and a gRNA molecule is |
| | | | provided as in vitro transcribed or synthesized |
| | | | RNA. In this embodiment, the donor template is |
| | | | provided as a DNA molecule. |
| mRNA | DNA | DNA | In this embodiment, a Cas9 molecule, typically |
| | | | an eaCas9 molecule, is translated from in vitro |
| | | | transcribed mRNA, and a gRNA molecule is |
| | | | transcribed from DNA. In this embodiment, the |
| | | | donor template is provided as a separate DNA |
| | | | molecule. |
| mRNA | DNA | | In this embodiment, a Cas9 molecule, typically |
| | | | an eaCas9 molecule, is translated from in vitro |
| | | | transcribed mRNA, and a gRNA molecule is |
| | | | transcribed from DNA. In this embodiment, the |
| | | | donor template is provided on the same DNA |
| | | | molecule that encodes the gRNA molecule. |
| Protein | DNA | DNA | In this embodiment, a Cas9 molecule, typically |
| | | | an eaCas9 molecule, is provided as a protein, |
| | | | and a gRNA molecule is transcribed from |
| | | | DNA. In this embodiment, the donor template |
| | | | is provided as a separate DNA molecule. |
| Protein | DNA | | In this embodiment, a Cas9 molecule, typically |
| | | | an eaCas9 molecule, is provided as a protein, |
| | | | and a gRNA is transcribed from DNA. In this |
| | | | embodiment, the donor template is provided on |
| | | | the same DNA molecule that encodes the gRNA |
| | | | molecule. |
| Protein | RNA | DNA | In this embodiment, an eaCas9 molecule is |
| | | | provided as a protein, and a gRNA molecule is |
| | | | provided as transcribed or synthesized RNA. In |
| | | | this embodiment, the donor template is provided |
| | | | as a DNA molecule. |

[1063] Table 7 summarizes various delivery methods for the components of a Cas system, e.g., the Cas9 molecule component and the gRNA molecule component, as described herein.

TABLE 7

| | | Delivery | | | |
|---|---|---|---|---|---|
| | | into Non- | | | Type of |
| | | Dividing | Duration of | Genome | Molecule |
| Delivery Vector/Mode | | Cells | Expression | Integration | Delivered |
| Physical (e.g., | | YES | Transient | NO | Nucleic Acids |
| electroporation, particle gun, | | | | | and Proteins |
| calcium phosphate | | | | | |
| transfection, cell compression | | | | | |
| or squeezing) | | | | | |
| Viral | Retrovirus | NO | Stable | YES | RNA |
| | Lentivirus | YES | Stable | YES/NO with | RNA |
| | | | | modifications | |
| | Adenovirus | YES | Transient | NO | DNA |
| | Adeno- | YES | Stable | NO | DNA |
| | Associated | | | | |
| | Virus (AAV) | | | | |
| | Vaccinia Virus | YES | Very | NO | DNA |
| | | | Transient | | |
| | Herpes Simplex | YES | Stable | NO | DNA |
| | Virus | | | | |
| Non-Viral | Cationic | YES | Transient | Depends on | Nucleic Acids |
| | Liposomes | | | what is | and Proteins |
| | | | | delivered | |
| | Polymeric | YES | Transient | Depends on | Nucleic Acids |
| | Nanoparticles | | | what is | and Proteins |
| | | | | delivered | |
| Biological | Attenuated | YES | Transient | NO | Nucleic Acids |
| Non-Viral | Bacteria | | | | |
| Delivery | Engineered | YES | Transient | NO | Nucleic Acids |
| Vehicles | Bacteriophages | | | | |
| | Mammalian | YES | Transient | NO | Nucleic Acids |
| | Virus-like | | | | |
| | Particles | | | | |
| | Biological | YES | Transient | NO | Nucleic Acids |
| | liposomes: | | | | |
| | Erythrocyte | | | | |
| | Ghosts and | | | | |
| | Exosomes | | | | |

DNA-Based Delivery of a Cas9 Molecule and/or One or More gRNA Molecule and/or a Donor Template

[1064] Nucleic acids encoding Cas9 molecules (e.g., eaCas9 molecules), gRNA molecules, donor template nucleic acid, or any combination (e.g., two or all) thereof, can be administered to subjects or delivered into cells by art-known methods or as described herein. For example, Cas9-encoding and/or gRNA-encoding DNA, as well as donor template nucleic acids, can be delivered by, e.g., vectors (e.g., viral or non-viral vectors), non-vector based methods (e.g., using naked DNA or DNA complexes), or a combination thereof.

[1065] Nucleic acids encoding Cas9 molecules (e.g., eaCas9 molecules) and/or gRNA molecules can be conjugated to molecules (e.g., N-acetylgalactosamine) promoting uptake by the target cells (e.g., erythrocytes, HSCs). Donor template molecules can likewise be conjugated to molecules (e.g., N-acetylgalactosamine) promoting uptake by the target cells (e.g., erythrocytes, HSCs).

[1066] In some embodiments, the Cas9- and/or gRNA-encoding DNA is delivered by a vector (e.g., viral vector/virus or plasmid).

[1067] Vectors can comprise a sequence that encodes a Cas9 molecule and/or a gRNA molecule and/or a donor template with high homology to the region (e.g., target sequence) being targeted. In certain embodiments, the donor template comprises all or part of a target sequence.

[1068] Exemplary donor templates are a repair template, e.g., a gene correction template, or a gene mutation template, e.g., point mutation (e.g., single nucleotide (nt) substitution) template. A vector can also comprise a sequence encoding a signal peptide (e.g., for nuclear localization, nucleolar localization, or mitochondrial localization), fused, e.g., to a Cas9 molecule sequence. For example, the vectors can comprise a nuclear localization sequence (e.g., from SV40) fused to the sequence encoding the Cas9 molecule.

[1069] One or more regulatory/control elements, e.g., promoters, enhancers, introns, polyadenylation signals, Kozak consensus sequences, internal ribosome entry sites (IRES), can be included in the vectors. In some embodiments, the promoter is recognized by RNA polymerase II (e.g., a CMV promoter). In other embodiments, the promoter is recognized by RNA polymerase III (e.g., a U6 promoter). In some embodiments, the promoter is a regulated promoter (e.g., inducible promoter). In other embodiment, the promoter is a constitutive promoter. In some embodiments, the promoter is a tissue specific promoter. In other embodiments, the promoter is a viral promoter. In some embodiments, the promoter is a non-viral promoter.

[1070] In some embodiments, the vector is a viral vector (e.g., for generation of recombinant viruses). In some embodiments, the virus is a DNA virus (e.g., dsDNA or ssDNA virus). In other embodiments, the virus is an RNA virus (e.g., an ssRNA virus). In some embodiments, the virus infects dividing cells. In other embodiments, the virus infects non-dividing cells. Exemplary viral vectors/viruses include, e.g., retroviruses, lentiviruses, adenovirus, adeno-associated virus (AAV), vaccinia viruses, poxviruses, and herpes simplex viruses.

[1071] In some embodiments, the virus infects both dividing and non-dividing cells. In some embodiments, the virus can integrate into the host genome. In some embodiments, the virus is engineered to have reduced immunity, e.g., in human. In some embodiments, the virus is replication-competent. In other embodiments, the virus is replication-defective, e.g., having one or more coding regions for the genes necessary for additional rounds of virion replication and/or packaging replaced with other genes or deleted. In some embodiments, the virus causes transient expression of the Cas9 molecule and/or the gRNA molecule. In other embodiments, the virus causes long-lasting, e.g., at least 1 week, 2 weeks, 1 month, 2 months, 3 months, 6 months, 9 months, 1 year, 2 years, or permanent expression, of the Cas9 molecule and/or the gRNA molecule. The packaging capacity of the viruses may vary, e.g., from at least about 4 kb to at least about 30 kb, e.g., at least about 5 kb, 10 kb, 15 kb, 20 kb, 25 kb, 30 kb, 35 kb, 40 kb, 45 kb, or 50 kb.

[1072] In an embodiment, the viral vector recognizes a specific cell type or tissue. For example, the viral vector can be pseudotyped with a different/alternative viral envelope glycoprotein; engineered with a cell type-specific receptor (e.g., genetic modification(s) of one or more viral envelope glycoproteins to incorporate a targeting ligand such as a peptide ligand, a single chain antibody, or a growth factor); and/or engineered to have a molecular bridge with dual specificities with one end recognizing a viral glycoprotein and the other end recognizing a moiety of the target cell surface (e.g., a ligand-receptor, monoclonal antibody, avidin-biotin and chemical conjugation).

[1073] In some embodiments, the Cas9- and/or gRNA-encoding nucleic acid sequence is delivered by a recombinant retrovirus. In some embodiments, the retrovirus (e.g., Moloney murine leukemia virus) comprises a reverse transcriptase, e.g., that allows integration into the host genome. In some embodiments, the retrovirus is replication-competent. In other embodiments, the retrovirus is replication-defective, e.g., having one of more coding regions for the genes necessary for additional rounds of virion replication and packaging replaced with other genes, or deleted.

[1074] In an embodiment, the Cas9- and/or gRNA-encoding nucleic acid sequence is delivered by a recombinant lentivirus. In an embodiment, the donor template nucleic acid is delivered by a recombinant lentivirus. For example, the lentivirus is replication-defective, e.g., does not comprise one or more genes required for viral replication.

[1075] In some embodiments, the Cas9- and/or gRNA-encoding nucleic acid sequence is delivered by a recombinant adenovirus. In an embodiment, the donor template nucleic acid is delivered by a recombinant adenovirus. In some embodiments, the adenovirus is engineered to have reduced immunity in human.

[1076] In some embodiments, the Cas9- and/or gRNA-encoding nucleic acid sequence is delivered by a recombinant AAV. In an embodiment, the donor template nucleic acid is delivered by a recombinant AAV. In some embodiments, the AAV does not incorporate its genome into that of a host cell, e.g., a target cell as describe herein. In some embodiments, the AAV can incorporate its genome into that of a host cell. In some embodiments, the AAV is a self-complementary adeno-associated virus (scAAV), e.g., a scAAV that packages both strands which anneal together to form double stranded DNA.

[1077] In an embodiment, an AAV capsid that can be used in the methods described herein is a capsid sequence from serotype AAV1, AAV2, AAV3, AAV4, AAV5, AAV6, AAV7, AAV8, AAV9, AAV.rh8, AAV.rh10, AAV.rh32/33, AAV.rh43, AAV.rh64R1, or AAV7m8.

[1078] In an embodiment, the Cas9- and/or gRNA-encoding DNA is delivered in a re-engineered AAV capsid, e.g., with 50% or greater, e.g., 60% or greater, 70% or greater, 80% or greater, 90% or greater, or 95% or greater, sequence homology with a capsid sequence from serotypes AAV1, AAV2, AAV3, AAV4, AAV5, AAV6, AAV7, AAV8, AAV9, AAV.rh8, AAV.rh10, AAV.rh32/33, AAV.rh43, or AAV.rh64R1.

[1079] In an embodiment, the Cas9- and/or gRNA-encoding DNA is delivered by a chimeric AAV capsid. In an embodiment, the donor template nucleic acid is delivered by a chimeric AAV capsid. Exemplary chimeric AAV capsids include, but are not limited to, AAV9i1, AAV2i8, AAV-DJ, AAV2G9, AAV2i8G9, or AAV8G9.

[1080] In an embodiment, the AAV is a self-complementary adeno-associated virus (scAAV), e.g., a scAAV that packages both strands which anneal together to form double stranded DNA.

[1081] In some embodiments, the Cas9- and/or gRNA-encoding DNA is delivered by a hybrid virus, e.g., a hybrid of one or more of the viruses described herein. In an embodiment, the hybrid virus is hybrid of an AAV (e.g., of any AAV serotype), with a Bocavirus, B19 virus, porcine AAV, goose AAV, feline AAV, canine AAV, or MVM.

[1082] A packaging cell is used to form a virus particle that is capable of infecting a target cell. Exemplary packaging cells include 293 cells, which can package adenovirus, and ψ2 or PA317 cells, which can package retrovirus. A viral vector used in gene therapy is usually generated by a producer cell line that packages a nucleic acid vector into a viral particle. The vector typically contains the minimal viral sequences required for packaging and subsequent integration into a host or target cell (if applicable), with other viral sequences being replaced by an expression cassette encoding the protein to be expressed, e.g. Cas9. For example, an AAV vector used in gene therapy typically only possesses inverted terminal repeat (ITR) sequences from the AAV genome which are required for packaging and gene expression in the host or target cell. The missing viral functions can be supplied in trans by the packaging cell line and/or plasmid containing E2A, E4, and VA genes from adenovirus, and plasmid encoding Rep and Cap genes from AAV, as described in “Triple Transfection Protocol.” Henceforth, the viral DNA is packaged in a cell line, which contains a helper plasmid encoding the other AAV genes, namely rep and cap, but lacking ITR sequences. In certain embodiments, the viral DNA is packaged in a producer cell line, which contains E1A and/or E1B genes from adenovirus. The cell line is also infected with adenovirus as a helper. The helper virus (e.g., adenovirus or HSV) or helper plasmid promotes replication of the AAV vector and expression of AAV genes from the helper plasmid with LTRs. The helper plasmid is not packaged in significant amounts due to a lack of ITR sequences. Contamination with adenovirus can be reduced by, e.g., heat treatment to which adenovirus is more sensitive than AAV.

[1083] In certain embodiments, the viral vector is capable of cell type and/or tissue type recognition. For example, the viral vector can be pseudotyped with a different/alternative viral envelope glycoprotein; engineered with a cell type-specific receptor (e.g., genetic modification of the viral envelope glycoproteins to incorporate targeting ligands such as a peptide ligand, single chain antibody, or growth factor); and/or engineered to have a molecular bridge with dual specificities with one end recognizing a viral glycoprotein and the other end recognizing a moiety of the target cell surface (e.g., ligand-receptor, monoclonal antibody, avidin-biotin and chemical conjugation).

[1084] In certain embodiments, the viral vector achieves cell type specific expression. For example, a tissue-specific promoter can be constructed to restrict expression of the transgene (Cas9 and gRNA) to only the target cell. The specificity of the vector can also be mediated by microRNA-dependent control of transgene expression. In an embodiment, the viral vector has increased efficiency of fusion of the viral vector and a target cell membrane. For example, a fusion protein such as fusion-competent hemagglutin (HA) can be incorporated to increase viral uptake into cells. In an embodiment, the viral vector has the ability of nuclear localization. For example, a virus that requires the breakdown of the nuclear envelope (during cell division) and therefore will not infect a non-diving cell can be altered to incorporate a nuclear localization peptide in the matrix protein of the virus thereby enabling the transduction of non-proliferating cells.

[1085] In some embodiments, the Cas9- and/or gRNA-encoding DNA is delivered by a non-vector based method (e.g., using naked DNA or DNA complexes). For example, the DNA can be delivered, e.g., by organically modified silica or silicate (Ormosil), electroporation, transient cell compression or squeezing (see, e.g., Lee 2012), gene gun, sonoporation, magnetofection, lipid-mediated transfection, dendrimers, inorganic nanoparticles, calcium phosphates, or a combination thereof.

[1086] In an embodiment, delivery via electroporation comprises mixing the cells with the Cas9- and/or gRNA-encoding DNA in a cartridge, chamber or cuvette and applying one or more electrical impulses of defined duration and amplitude. In an embodiment, delivery via electroporation is performed using a system in which cells are mixed with the Cas9- and/or gRNA-encoding DNA in a vessel connected to a device (e.g., a pump) which feeds the mixture into a cartridge, chamber or cuvette wherein one or more electrical impulses of defined duration and amplitude are applied, after which the cells are delivered to a second vessel.

[1087] In some embodiments, the Cas9- and/or gRNA-encoding DNA is delivered by a combination of a vector and a non-vector based method. In an embodiment, the donor template nucleic acid is delivered by a combination of a vector and a non-vector based method. For example, virosomes combine liposomes with an inactivated virus (e.g., HIV or influenza virus), which can result in more efficient gene transfer, e.g., in respiratory epithelial cells than either viral or liposomal methods alone.

[1088] As described above, a nucleic acid may comprise (a) a sequence encoding a gRNA molecule comprising a targeting domain that is complementary with a target domain in the HBB gene, and (b) a sequence encoding a Cas9 molecule. In an embodiment, (a) and (b) are present on the same nucleic acid molecule, e.g., the same vector, e.g., the same viral vector, e.g., the same adeno-associated virus (AAV) vector. In an embodiment, the nucleic acid molecule is an AAV vector. Exemplary AAV vectors that may be used in any of the described compositions and methods include an AAV2 vector, a modified AAV2 vector, an AAV3 vector, a modified AAV3 vector, an AAV6 vector, a modified AAV6 vector, an AAV8 vector and an AAV9 vector. In another embodiment, (a) is present on a first nucleic acid molecule, e.g., a first vector, e.g., a first viral vector, e.g., a first AAV vector; and (b) is present on a second nucleic acid molecule, e.g., a second vector, e.g., a second vector, e.g., a second AAV vector. The first and second nucleic acid molecules may be AAV vectors. In yet another embodiment, the nucleic acid may further comprise (c) a sequence that encodes a second, third and/or fourth gRNA molecule as described herein. In an embodiment, the nucleic acid comprises (a), (b) and (c). Each of (a) and (c) may be present on the same nucleic acid molecule, e.g., the same vector, e.g., the same viral vector, e.g., the same adeno-associated virus (AAV) vector. In an embodiment, the nucleic acid molecule is an AAV vector.

[1089] In another embodiment, (a) and (c) are on different vectors. For example, (a) may be present on a first nucleic acid molecule, e.g., a first vector, e.g., a first viral vector, e.g., a first AAV vector; and (c) may be present on a second nucleic acid molecule, e.g., a second vector, e.g., a second vector, e.g., a second AAV vector. In an embodiment, the first and second nucleic acid molecules are AAV vectors. In yet another embodiment, each of (a), (b), and (c) are present on the same nucleic acid molecule, e.g., the same vector, e.g., the same viral vector, e.g., an AAV vector. In an embodiment, the nucleic acid molecule is an AAV vector. In an alternate embodiment, one of (a), (b), and (c) is encoded on a first nucleic acid molecule, e.g., a first vector, e.g., a first viral vector, e.g., a first AAV vector; and a second and third of (a), (b), and (c) is encoded on a second nucleic acid molecule, e.g., a second vector, e.g., a second vector, e.g., a second AAV vector. The first and second nucleic acid molecule may be AAV vectors.

[1090] In an embodiment, (a) is present on a first nucleic acid molecule, e.g., a first vector, e.g., a first viral vector, a first AAV vector; and (b) and (c) are present on a second nucleic acid molecule, e.g., a second vector, e.g., a second vector, e.g., a second AAV vector. The first and second nucleic acid molecule may be AAV vectors. In another embodiment, (b) is present on a first nucleic acid molecule, e.g., a first vector, e.g., a first viral vector, e.g., a first AAV vector; and (a) and (c) are present on a second nucleic acid molecule, e.g., a second vector, e.g., a second vector, e.g., a second AAV vector. The first and second nucleic acid molecule may be AAV vectors.

[1091] In another embodiment, (c) is present on a first nucleic acid molecule, e.g., a first vector, e.g., a first viral vector, e.g., a first AAV vector; and (b) and (a) are present on a second nucleic acid molecule, e.g., a second vector, e.g., a second vector, e.g., a second AAV vector. The first and second nucleic acid molecule may be AAV vectors.

[1092] In another embodiment, each of (a), (b) and (c) are present on different nucleic acid molecules, e.g., different vectors, e.g., different viral vectors, e.g., different AAV vector. For example, (a) may be on a first nucleic acid molecule, (b) on a second nucleic acid molecule, and (c) on a third nucleic acid molecule. The first, second and third nucleic acid molecule may be AAV vectors.

[1093] In another embodiment, when a third and/or fourth gRNA molecule are present, each of (a), (b), (c)(i), (c)(ii) and (c)(iii) may be present on the same nucleic acid molecule, e.g., the same vector, e.g., the same viral vector, e.g., an AAV vector. In an embodiment, the nucleic acid molecule is an AAV vector. In an alternate embodiment, each of (a), (b), (c)(i), (c)(ii) and (c)(iii) may be present on the different nucleic acid molecules, e.g., different vectors, e.g., the different viral vectors, e.g., different AAV vectors. In further embodiments, each of (a), (b), (c)(i), (c)(ii) and (c)(iii) may be present on more than one nucleic acid molecule, but fewer than five nucleic acid molecules, e.g., AAV vectors.

[1094] In another embodiment, when (d) a template nucleic acid is present, each of (a), (b), and (d) may be present on the same nucleic acid molecule, e.g., the same vector, e.g., the same viral vector, e.g., an AAV vector. In an embodiment, the nucleic acid molecule is an AAV vector. In an alternate embodiment, each of (a), (b), and (d) may be present on the different nucleic acid molecules, e.g., different vectors, e.g., the different viral vectors, e.g., different AAV vectors. In further embodiments, each of (a), (b), and (d) may be present on more than one nucleic acid molecule, but fewer than three nucleic acid molecules, e.g., AAV vectors.

[1095] In another embodiment, when (d) a template nucleic acid is present, each of (a), (b), (c)(i) and (d) may be present on the same nucleic acid molecule, e.g., the same vector, e.g., the same viral vector, e.g., an AAV vector. In an embodiment, the nucleic acid molecule is an AAV vector. In an alternate embodiment, each of (a), (b), (c)(i) and (d) may be present on the different nucleic acid molecules, e.g., different vectors, e.g., the different viral vectors, e.g., different AAV vectors. In further embodiments, each of (a), (b), (c)(i) and (d) may be present on more than one nucleic acid molecule, but fewer than four nucleic acid molecules, e.g., AAV vectors.

[1096] In another embodiment, when (d) a template nucleic acid is present, each of (a), (b), (c)(i), (c)(ii) and (d) may be present on the same nucleic acid molecule, e.g., the same vector, e.g., the same viral vector, e.g., an AAV vector. In an embodiment, the nucleic acid molecule is an AAV vector. In an alternate embodiment, each of (a), (b), (c)(i), (c)(ii) and (d) may be present on the different nucleic acid molecules, e.g., different vectors, e.g., the different viral vectors, e.g., different AAV vectors. In further embodiments, each of (a), (b), (c)(i), (c)(ii) and (d) may be present on more than one nucleic acid molecule, but fewer than five nucleic acid molecules, e.g., AAV vectors.

[1097] In another embodiment, when (d) a template nucleic acid is present, each of (a), (b), (c)(i), (c)(ii), (c)(iii) and (d) may be present on the same nucleic acid molecule, e.g., the same vector, e.g., the same viral vector, e.g., an AAV vector. In an embodiment, the nucleic acid molecule is an AAV vector. In an alternate embodiment, each of (a), (b), (c)(i), (c)(ii), (c)(iii) and (d) may be present on the different nucleic acid molecules, e.g., different vectors, e.g., the different viral vectors, e.g., different AAV vectors. In further embodiments, each of (a), (b), (c)(i), (c)(ii), (c)(iii) and (d) may be present on more than one nucleic acid molecule, but fewer than six nucleic acid molecules, e.g., AAV vectors.

[1098] The nucleic acids described herein may comprise a promoter operably linked to the sequence that encodes the gRNA molecule of (a), e.g., a promoter described herein. The nucleic acid may further comprise a second promoter operably linked to the sequence that encodes the second, third and/or fourth gRNA molecule of (c), e.g., a promoter described herein. The promoter and second promoter differ from one another. In an embodiment, the promoter and second promoter are the same.

[1099] The nucleic acids described herein may further comprise a promoter operably linked to the sequence that encodes the Cas9 molecule of (b), e.g., a promoter described herein.

[1100] In certain embodiments, the delivery vehicle is a non-viral vector, and in certain of these embodiments the non-viral vector is an inorganic nanoparticle. Exemplary inorganic nanoparticles include, e.g., magnetic nanoparticles (e.g., Fe₃MnO₂) or silica. The outer surface of the nanoparticle can be conjugated with a positively charged polymer (e.g., polyethylenimine, polylysine, polyserine) which allows for attachment (e.g., conjugation or entrapment) of payload. In an embodiment, the non-viral vector is an organic nanoparticle (e.g., entrapment of the payload inside the nanoparticle). Exemplary organic nanoparticles include, e.g., SNALP liposomes that contain cationic lipids together with neutral helper lipids which are coated with polyethylene glycol (PEG) and protamine and nucleic acid complex coated with lipid coating.

[1101] Exemplary lipids for gene transfer are shown below in Table 8.

TABLE 8
Lipids Used for Gene Transfer

| Lipid | Abbreviation | Feature |
|---|---|---|
| 1,2-Dioleoyl-sn-glycero-3-phosphatidylcholine | DOPC | Helper |
| l,2-Dioleoyl-sn-glycero-3-phosphatidylethanolamine | DOPE | Helper |
| Cholesterol | | Helper |
| N-[1-(2,3-Dioleyloxy)propyl]N,N,N-trimethylammonium | DOTMA | Cationic |
| chloride | | |
| l,2-Dioleoyloxy-3-trimethylammonium-propane | DOTAP | Cationic |
| Dioctadecylamidoglycylspermine | DOGS | Cationic |
| N-(3-Aminopropyl)-N,N-dimethyl-2,3-bis(dodecyloxy)-1- | GAP-DLRIE | Cationic |
| propanaminium bromide | | |
| Cetyltrimethylammonium bromide | CTAB | Cationic |
| 6-Lauroxyhexyl ornithinate | LHON | Cationic |
| l-(2,3-Dioleoyloxypropyl)-2,4,6-trimethylpyridinium | 2Oc | Cationic |
| 2,3-Dioleyloxy-N-[2(sperminecarboxamido-ethyl]-N,N-dimethyl- | DOSPA | Cationic |
| 1-propanaminium trifluoroacetate | | |
| l,2-Dioleyl-3-trimethylammonium-propane | DOPA | Cationic |
| N-(2-Hydroxyethyl)-N,N-dimethyl-2,3-bis(tetradecyloxy)-1- | MDRIE | Cationic |
| propanaminium bromide | | |
| Dimyristooxypropyl dimethyl hydroxyethyl ammonium bromide | DMRI | Cationic |
| 3β-[N-(N′,N′-Dimethylaminoethane)-carbamoyl]cholesterol | DC-Chol | Cationic |
| Bis-guanidium-tren-cholesterol | BGTC | Cationic |
| l,3-Diodeoxy-2-(6-carboxy-spermyl)-propylamide | DOSPER | Cationic |
| Dimethyloctadecylammonium bromide | DDAB | Cationic |
| Dioctadecylamidoglicylspermidin | DSL | Cationic |
| rac-[(2,3-Dioctadecyloxypropyl)(2-hydroxyethyl)]- | CLIP-1 | Cationic |
| dimethylammonium chloride | | |
| rac-[2(2,3-Dihexadecyloxypropyl- | CLIP-6 | Cationic |
| oxymethyloxy)ethyl]trimethylammonium bromide | | |
| Ethyldimyristoylphosphatidylcholine | EDMPC | Cationic |
| l,2-Distearyloxy-N,N-dimethyl-3-aminopropane | DSDMA | Cationic |
| 1,2-Dimyristoyl-trimethylammonium propane | DMTAP | Cationic |
| O,O′-Dimyristyl-N-lysyl aspartate | DMKE | Cationic |
| 1,2-Distearoyl-sn-glycero-3-ethylphosphocholine | DSEPC | Cationic |
| N-Palmitoyl D-erythro-sphingosyl carbamoyl-spermine | CCS | Cationic |
| N-t-Butyl-N0-tetradecyl-3-tetradecylaminopropionamidine | diC14-amidine | Cationic |
| Octadecenolyoxy[ethyl-2-heptadecenyl-3 hydroxyethyl] | DOTIM | Cationic |
| imidazolinium chloride | | |
| N1-Cholesteryloxycarbonyl-3,7-diazanonane-1,9-diamine | CDAN | Cationic |
| 2-(3-[Bis(3-amino-propyl)-amino]propylamino)-N- | RPR209120 | Cationic |
| ditetradecylcarbamoylme-ethyl-acetamide | | |
| 1,2-dilinoleyloxy-3-dimethylaminopropane | DLinDMA | Cationic |
| 2,2-dilinoleyl-4-dimethylaminoethyl-[1,3]- dioxolane | DLin-KC2- | Cationic |
| | DMA | |
| dilinoleyl-methyl-4-dimethylaminobutyrate | DLin-MC3- | Cationic |
| | DMA | |

[1102] Exemplary polymers for gene transfer are shown below in Table 9.

TABLE 9
Polymers Used for Gene Transfer

| Polymer | Abbreviation |
|---|---|
| Poly(ethylene)glycol | PEG |
| Polyethylenimine | PEI |
| Dithiobis(succinimidylpropionate) | DSP |
| Dimethyl-3,3′-dithiobispropionimidate | DTBP |
| Poly(ethylene imine) biscarbamate | PEIC |
| Poly(L-lysine) | PLL |
| Histidine modified PLL | |
| Poly(N-vinylpyrrolidone) | PVP |
| Poly(propylenimine) | PPI |
| Poly(amidoamine) | PAMAM |
| Poly(amido ethylenimine) | SS-PAEI |
| Triethylenetetramine | TETA |
| Poly(β-aminoester) | |
| Poly(4-hydroxy-L-proline ester) | PHP |
| Poly(allylamine) | |
| Poly(α-[4-aminobutyl]-L-glycolic acid) | PAGA |
| Poly(D,L-lactic-co-glycolic acid) | PLGA |
| Poly(N-ethyl-4-vinylpyridinium bromide) | |
| Poly (phosphazene)s | PPZ |
| Poly(phosphoester)s | PPE |
| Poly(phosphoramidate)s | PPA |
| Poly(N-2-hydroxypropylmethacrylamide) | pHPMA |
| Poly (2-(dimethylamino)ethyl methacrylate) | pDMAEMA |
| Poly(2-aminoethyl propylene phosphate) | PPE-EA |
| Chitosan | |
| Galactosylated chitosan | |
| N-Dodacylated chitosan | |
| Histone | |
| Collagen | |
| Dextran-spermine | D-SPM |

[1103] In an embodiment, the vehicle has targeting modifications to increase target cell update of nanoparticles and liposomes, e.g., cell specific antigens, monoclonal antibodies, single chain antibodies, aptamers, polymers, sugars (e.g., N-acetylgalactosamine (GalNAc)), and cell penetrating peptides. In an embodiment, the vehicle uses fusogenic and endosome-destabilizing peptides/polymers. In an embodiment, the vehicle undergoes acid-triggered conformational changes (e.g., to accelerate endosomal escape of the cargo). In an embodiment, a stimuli-cleavable polymer is used, e.g., for release in a cellular compartment. For example, disulfide-based cationic polymers that are cleaved in the reducing cellular environment can be used.

[1104] In an embodiment, the delivery vehicle is a biological non-viral delivery vehicle. In an embodiment, the vehicle is an attenuated bacterium (e.g., naturally or artificially engineered to be invasive but attenuated to prevent pathogenesis and expressing the transgene (e.g., Listeria monocytogenes, certain Salmonella strains, Bifidobacterium longum, and modified Escherichia coli), bacteria having nutritional and tissue-specific tropism to target specific tissues, bacteria having modified surface proteins to alter target tissue specificity). In an embodiment, the vehicle is a genetically modified bacteriophage (e.g., engineered phages having large packaging capacity, less immunogenic, containing mammalian plasmid maintenance sequences and having incorporated targeting ligands). In an embodiment, the vehicle is a mammalian virus-like particle. For example, modified viral particles can be generated (e.g., by purification of the “empty” particles followed by ex vivo assembly of the virus with the desired cargo). The vehicle can also be engineered to incorporate targeting ligands to alter target tissue specificity. In an embodiment, the vehicle is a biological liposome. For example, the biological liposome is a phospholipid-based particle derived from human cells (e.g., erythrocyte ghosts, which are red blood cells broken down into spherical structures derived from the subject (e.g., tissue targeting can be achieved by attachment of various tissue or cell-specific ligands), or secretory exosomes—subject (i.e., patient) derived membrane-bound nanovesicle (30-100 nm) of endocytic origin (e.g., can be produced from various cell types and can therefore be taken up by cells without the need of for targeting ligands).

[1105] In an embodiment, one or more nucleic acid molecules (e.g., DNA molecules) other than the components of a Cas system, e.g., the Cas9 molecule component and/or the gRNA molecule component described herein, are delivered. In an embodiment, the nucleic acid molecule is delivered at the same time as one or more of the components of the Cas system are delivered. In an embodiment, the nucleic acid molecule is delivered before or after (e.g., less than about 30 minutes, 1 hour, 2 hours, 3 hours, 6 hours, 9 hours, 12 hours, 1 day, 2 days, 3 days, 1 week, 2 weeks, or 4 weeks) one or more of the components of the Cas system are delivered. In an embodiment, the nucleic acid molecule is delivered by a different means than one or more of the components of the Cas system, e.g., the Cas9 molecule component and/or the gRNA molecule component, are delivered. The nucleic acid molecule can be delivered by any of the delivery methods described herein. For example, the nucleic acid molecule can be delivered by a viral vector, e.g., an integration-deficient lentivirus, and the Cas9 molecule component and/or the gRNA molecule component can be delivered by electroporation, e.g., such that the toxicity caused by nucleic acids (e.g., DNAs) can be reduced. In an embodiment, the nucleic acid molecule encodes a therapeutic protein, e.g., a protein described herein. In an embodiment, the nucleic acid molecule encodes an RNA molecule, e.g., an RNA molecule described herein.

[1106] Delivery of RNA Encoding a Cas9 Molecule

[1107] RNA encoding Cas9 molecules and/or gRNA molecules, can be delivered into cells, e.g., target cells described herein, by art-known methods or as described herein. For example, Cas9-encoding and/or gRNA-encoding RNA can be delivered, e.g., by microinjection, electroporation, transient cell compression or squeezing (see, e.g., Lee 2012), lipid-mediated transfection, peptide-mediated delivery, or a combination thereof. Cas9-encoding and/or gRNA-encoding RNA can be conjugated to molecules) promoting uptake by the target cells (e.g., target cells described herein).

[1108] In an embodiment, delivery via electroporation comprises mixing the cells with the RNA encoding Cas9 molecules and/or gRNA molecules, with or without donor template nucleic acid molecules, in a cartridge, chamber or cuvette and applying one or more electrical impulses of defined duration and amplitude. In an embodiment, delivery via electroporation is performed using a system in which cells are mixed with the RNA encoding Cas9 molecules and/or gRNA molecules, with or without donor template nucleic acid molecules in a vessel connected to a device (e.g., a pump) which feeds the mixture into a cartridge, chamber or cuvette wherein one or more electrical impulses of defined duration and amplitude are applied, after which the cells are delivered to a second vessel. Cas9-encoding and/or gRNA-encoding RNA can be conjugated to molecules to promote uptake by the target cells (e.g., target cells described herein).

[1109] Delivery of Cas9

[1110] Cas9 molecules can be delivered into cells by art-known methods or as described herein. For example, Cas9 protein molecules can be delivered, e.g., by microinjection, electroporation, transient cell compression or squeezing (see, e.g., Lee 2012), lipid-mediated transfection, peptide-mediated delivery, or a combination thereof. Delivery can be accompanied by DNA encoding a gRNA or by a gRNA. Cas9 protein can be conjugated to molecules promoting uptake by the target cells (e.g., target cells described herein).

[1111] In an embodiment, delivery via electroporation comprises mixing the cells with the Cas9 molecules and/or gRNA molecules, with or without donor nucleic acid, in a cartridge, chamber or cuvette and applying one or more electrical impulses of defined duration and amplitude. In an embodiment, delivery via electroporation is performed using a system in which cells are mixed with the Cas9 molecules and/or gRNA molecules, with or without donor nucleic acid in a vessel connected to a device (e.g., a pump) which feeds the mixture into a cartridge, chamber or cuvette wherein one or more electrical impulses of defined duration and amplitude are applied, after which the cells are delivered to a second vessel. Cas9-encoding and/or gRNA-encoding RNA can be conjugated to molecules to promote uptake by the target cells (e.g., target cells described herein).

[1112] Route of Administration

[1113] Systemic modes of administration include oral and parenteral routes. Parenteral routes include, by way of example, intravenous, intramarrow, intrarterial, intramuscular, intradermal, subcutaneous, intranasal and intraperitoneal routes. Components administered systemically may be modified or formulated to target, e.g., HSCs, hematopoetic stem/progenitor cells, or erythroid progenitors or precursor cells.

[1114] Local modes of administration include, by way of example, intramarrow injection into the trabecular bone or intrafemoral injection into the marrow space, and infusion into the portal vein. In an embodiment, significantly smaller amounts of the components (compared with systemic approaches) may exert an effect when administered locally (for example, directly into the bone marrow) compared to when administered systemically (for example, intravenously). Local modes of administration can reduce or eliminate the incidence of potentially toxic side effects that may occur when therapeutically effective amounts of a component are administered systemically.

[1115] Administration may be provided as a periodic bolus (e.g., intravenously) or as continuous infusion from an internal reservoir or from an external reservoir (for example, from an intravenous bag or implantable pump). Components may be administered locally, for example, by continuous release from a sustained release drug delivery device.

[1116] In addition, components may be formulated to permit release over a prolonged period of time. A release system can include a matrix of a biodegradable material or a material which releases the incorporated components by diffusion. The components can be homogeneously or heterogeneously distributed within the release system. A variety of release systems may be useful, however, the choice of the appropriate system will depend upon rate of release required by a particular application. Both non-degradable and degradable release systems can be used. Suitable release systems include polymers and polymeric matrices, non-polymeric matrices, or inorganic and organic excipients and diluents such as, but not limited to, calcium carbonate and sugar (for example, trehalose). Release systems may be natural or synthetic. However, synthetic release systems are preferred because generally they are more reliable, more reproducible and produce more defined release profiles. The release system material can be selected so that components having different molecular weights are released by diffusion through or degradation of the material.

[1117] Representative synthetic, biodegradable polymers include, for example: polyamides such as poly(amino acids) and poly(peptides); polyesters such as poly(lactic acid), poly(glycolic acid), poly(lactic-co-glycolic acid), and poly(caprolactone); poly(anhydrides); polyorthoesters; polycarbonates; and chemical derivatives thereof (substitutions, additions of chemical groups, for example, alkyl, alkylene, hydroxylations, oxidations, and other modifications routinely made by those skilled in the art), copolymers and mixtures thereof. Representative synthetic, non-degradable polymers include, for example: polyethers such as poly(ethylene oxide), poly(ethylene glycol), and poly(tetramethylene oxide); vinyl polymers-polyacrylates and polymethacrylates such as methyl, ethyl, other alkyl, hydroxyethyl methacrylate, acrylic and methacrylic acids, and others such as poly(vinyl alcohol), poly(vinyl pyrolidone), and poly(vinyl acetate); poly(urethanes); cellulose and its derivatives such as alkyl, hydroxyalkyl, ethers, esters, nitrocellulose, and various cellulose acetates; polysiloxanes; and any chemical derivatives thereof (substitutions, additions of chemical groups, for example, alkyl, alkylene, hydroxylations, oxidations, and other modifications routinely made by those skilled in the art), copolymers and mixtures thereof.

[1118] Poly(lactide-co-glycolide) microsphere can also be used for injection. Typically the microspheres are composed of a polymer of lactic acid and glycolic acid, which are structured to form hollow spheres. The spheres can be approximately 15-30 microns in diameter and can be loaded with components described herein.

[1119] Bi-Modal or Differential Delivery of Components

[1120] Separate delivery of the components of a Cas system, e.g., the Cas9 molecule component and the gRNA molecule component, and more particularly, delivery of the components by differing modes, can enhance performance, e.g., by improving tissue specificity and safety.

[1121] In an embodiment, the Cas9 molecule and the gRNA molecule are delivered by different modes, or as sometimes referred to herein as differential modes. Different or differential modes, as used herein, refer modes of delivery that confer different pharmacodynamic or pharmacokinetic properties on the subject component molecule, e.g., a Cas9 molecule, gRNA molecule, template nucleic acid, or payload. For example, the modes of delivery can result in different tissue distribution, different half-life, or different temporal distribution, e.g., in a selected compartment, tissue, or organ.

[1122] Some modes of delivery, e.g., delivery by a nucleic acid vector that persists in a cell, or in progeny of a cell, e.g., by autonomous replication or insertion into cellular nucleic acid, result in more persistent expression of and presence of a component. Examples include viral, e.g., AAV or lentivirus, delivery.

[1123] By way of example, the components, e.g., a Cas9 molecule and a gRNA molecule, can be delivered by modes that differ in terms of resulting half-life or persistent of the delivered component the body, or in a particular compartment, tissue or organ. In an embodiment, a gRNA molecule can be delivered by such modes. The Cas9 molecule component can be delivered by a mode which results in less persistence or less exposure to the body or a particular compartment or tissue or organ.

[1124] More generally, in an embodiment, a first mode of delivery is used to deliver a first component and a second mode of delivery is used to deliver a second component. The first mode of delivery confers a first pharmacodynamic or pharmacokinetic property. The first pharmacodynamic property can be, e.g., distribution, persistence, or exposure, of the component, or of a nucleic acid that encodes the component, in the body, a compartment, tissue or organ. The second mode of delivery confers a second pharmacodynamic or pharmacokinetic property. The second pharmacodynamic property can be, e.g., distribution, persistence, or exposure, of the component, or of a nucleic acid that encodes the component, in the body, a compartment, tissue or organ.

[1125] In certain embodiments, the first pharmacodynamic or pharmacokinetic property, e.g., distribution, persistence or exposure, is more limited than the second pharmacodynamic or pharmacokinetic property.

[1126] In certain embodiments, the first mode of delivery is selected to optimize, e.g., minimize, a pharmacodynamic or pharmacokinetic property, e.g., distribution, persistence or exposure.

[1127] In certain embodiments, the second mode of delivery is selected to optimize, e.g., maximize, a pharmacodynamic or pharmacokinetic property, e.g., distribution, persistence or exposure.

[1128] In an embodiments, the first mode of delivery comprises the use of a relatively persistent element, e.g., a nucleic acid, e.g., a plasmid or viral vector, e.g., an AAV or lentivirus. As such vectors are relatively persistent product transcribed from them would be relatively persistent.

[1129] In certain embodiments, the second mode of delivery comprises a relatively transient element, e.g., an RNA or protein.

[1130] In certain embodiments, the first component comprises gRNA molecule, and the delivery mode is relatively persistent, e.g., the gRNA is transcribed from a plasmid or viral vector, e.g., an AAV or lentivirus. Transcription of these genes would be of little physiological consequence because the genes do not encode for a protein product, and the gRNAs are incapable of acting in isolation. The second component, a Cas9 molecule, is delivered in a transient manner, for example as mRNA or as protein, ensuring that the full Cas9 molecule/gRNA molecule complex is only present and active for a short period of time.

[1131] Furthermore, the components can be delivered in different molecular form or with different delivery vectors that complement one another to enhance safety and tissue specificity.

[1132] Use of differential delivery modes can enhance performance, safety and/or efficacy, e.g., the likelihood of an eventual off-target modification can be reduced. Delivery of immunogenic components, e.g., Cas9 molecules, by less persistent modes can reduce immunogenicity, as peptides from the bacterially-derived Cas enzyme are displayed on the surface of the cell by MHC molecules. A two-part delivery system can alleviate these drawbacks.

[1133] Differential delivery modes can be used to deliver components to different, but overlapping target regions. The formation active complex is minimized outside the overlap of the target regions. Thus, in an embodiment, a first component, e.g., a gRNA molecule is delivered by a first delivery mode that results in a first spatial, e.g., tissue, distribution. A second component, e.g., a Cas9 molecule is delivered by a second delivery mode that results in a second spatial, e.g., tissue, distribution. In an embodiment, the first mode comprises a first element selected from a liposome, nanoparticle, e.g., polymeric nanoparticle, and a nucleic acid, e.g., viral vector. The second mode comprises a second element selected from the group. In an embodiment, the first mode of delivery comprises a first targeting element, e.g., a cell specific receptor or an antibody, and the second mode of delivery does not include that element. In certain embodiments, the second mode of delivery comprises a second targeting element, e.g., a second cell specific receptor or second antibody.

[1134] When the Cas9 molecule is delivered in a virus delivery vector, a liposome, or polymeric nanoparticle, there is the potential for delivery to and therapeutic activity in multiple tissues, when it may be desirable to only target a single tissue. A two-part delivery system can resolve this challenge and enhance tissue specificity. If the gRNA molecule and the Cas9 molecule are packaged in separated delivery vehicles with distinct but overlapping tissue tropism, the fully functional complex is only be formed in the tissue that is targeted by both vectors.

[1135] Disclosed herein are methods of altering a cell, e.g., altering the structure, e.g., altering the sequence, of a target nucleic acid of a cell, comprising contacting said cell with: (a) a gRNA molecule that targets the HBB gene, e.g., a gRNA molecule as described herein; (b) a Cas9 molecule, e.g., a Cas9 molecule as described herein; and optionally, (c) a second, third and/or fourth gRNA that targets HBB gene, e.g., a gRNA molecule; and optionally, (d) a template nucleic acid, as described herein. In an embodiment, the method comprises contacting said cell with (a) and (b). In an embodiment, the method comprises contacting said cell with (a), (b), and (c). In an embodiment, the method comprises contacting said cell with (a), (b), (c) and (d). In an embodiment, the gRNA targets the HBB gene and no exogenous template nucleic acid is contacted with the cell. The targeting domain of the gRNA molecule of (a) and optionally (c) may be selected from a targeting domain sequence described herein, e.g., a targeting domain sequence selected from any of Tables 1-3, or a targeting domain sequence that differs by no more than 1, 2, 3, 4, or 5 nucleotides from, a targeting domain sequence described herein, e.g., a targeting domain sequence from any of Tables 1-3.

[1136] In an embodiment, the method comprises contacting a cell from a subject suffering from or likely to develop SCD. The cell may be from a subject having a mutation at an SCD target position in the HBB gene. In an embodiment, the cell being contacted in the disclosed method is an erythroid cell. The contacting may be performed ex vivo and the contacted cell may be returned to the subject's body after the contacting step. In another embodiment, the contacting step may be performed in vivo. In an embodiment, the method of altering a cell as described herein comprises acquiring knowledge of the sequence at an SCD target position in said cell, prior to the contacting step. Acquiring knowledge of the sequence at an SCD target position in the cell may be by sequencing the HBB gene, or a portion of the HBB gene. In an embodiment, the contacting step of the method comprises contacting the cell with a nucleic acid, e.g., a vector, e.g., an AAV vector, that expresses at least one of (a), (b), and (c). In an embodiment, the contacting step of the method comprises contacting the cell with a nucleic acid, e.g., a vector, e.g., an AAV vector, that expresses each of (a), (b), and (c). In another embodiment, the contacting step of the method comprises delivering to the cell a Cas9 molecule of (b) and a nucleic acid which encodes a gRNA molecule (a) and optionally, a second gRNA molecule (c)(i) (and further optionally, a third gRNA molecule (c)(iv) and/or fourth gRNA molecule (c)(iii).

[1137] In an embodiment, the contacting step of the method comprises contacting the cell with a nucleic acid, e.g., a vector, e.g., an AAV vector, that expresses at least one of (a), (b), (c) and (d). In an embodiment, the contacting step of the method comprises contacting the cell with a nucleic acid, e.g., a vector, e.g., an AAV vector, that expresses each of (a), (b), and (c). In another embodiment, the contacting step of the method comprises delivering to the cell a Cas9 molecule of (b), a nucleic acid which encodes a gRNA molecule of (a) and a template nucleic acid of (d), and optionally, a second gRNA molecule (c)(i) (and further optionally, a third gRNA molecule (c)(iv) and/or fourth gRNA molecule (c)(iii).

[1138] In an embodiment, contacting comprises contacting the cell with a nucleic acid, e.g., a vector, e.g., an AAV vector, e.g., an AAV2 vector, a modified AAV2 vector, an AAV3 vector, a modified AAV3 vector, an AAV6 vector, a modified AAV6 vector, an AAV8 vector or an AAV9 vector.

[1139] In an embodiment, contacting comprises delivering to the cell a Cas9 molecule of (b), as a protein or an mRNA, and a nucleic acid which encodes (a) and optionally a second, third and/or fourth gRNA molecule of (c).

[1140] In an embodiment, contacting comprises delivering to the cell a Cas9 molecule of (b), as a protein or an mRNA, said gRNA molecule of (a), as an RNA, and optionally said second, third and/or fourth gRNA molecule of (c), as an RNA.

[1141] In an embodiment, contacting comprises delivering to the cell a gRNA of (a) as an RNA, optionally said second, third and/or fourth gRNA molecule of (c) as an RNA, and a nucleic acid that encodes the Cas9 molecule of (b).

[1142] Disclosed herein are also methods of treating or preventing a subject suffering from or likely to develop SCD, e.g., altering the structure, e.g., sequence, of a target nucleic acid of the subject, comprising contacting the subject (or a cell from the subject) with:

[1143] (a) a gRNA that targets the HBB gene, e.g., a gRNA disclosed herein;

[1144] (b) a Cas9 molecule, e.g., a Cas9 molecule disclosed herein; and

[1145] optionally, (c)(i) a second gRNA that targets the HBB gene, e.g., a second gRNA disclosed herein, and further optionally, (c)(ii) a third gRNA molecule, and still further optionally, (c)(iii) a fourth gRNA molecule that targets the HBB gene, e.g., a third and fourth gRNA disclosed herein. The method of treating a subject may further comprise contacting the subject (or a cell from the subject) with (d) a template nucleic acid (in an embodiment where an exogenous template is used), e.g., a template nucleic acid disclosed herein. In an embodiment, a template nucleic acid is used when the method of treating a subject uses HDR to alter the sequence of the target nucleic acid of the subject. In an embodiment, the gRNA molecule targets the HBB gene and no exogenous template nucleic acid is contacted with the subject (or a cell from the subject). In an embodiment, contacting comprises contacting with (a) and (b). In an embodiment, contacting comprises contacting with (a), (b), and (c)(i). In an embodiment, contacting comprises contacting with (a), (b), (c)(i) and (c)(ii). In an embodiment, contacting comprises contacting with (a), (b), (c)(i), (c)(ii) and (c)(iii). In an embodiment, contacting comprises contacting with (a), (b), (c)(i) and (d). In an embodiment, contacting comprises contacting with (a), (b), (c)(i), (c)(ii) and (d). In an embodiment, contacting comprises contacting with (a), (b), (c)(i), (c)(ii), (c)(iii) and (d).

[1146] The targeting domain of the gRNA molecule of (a) or (c) (e.g., (c)(i), (c)(ii), or (c)(iii)) may be selected from a targeting domain sequence described herein, e.g., a targeting domain sequence selected from any of Tables 1-3, or a targeting domain sequence that differs by no more than 1, 2, 3, 4, or 5 nucleotides from a targeting domain sequence described herein, e.g., a targeting domain sequence from any of Tables 1-3.

[1147] In an embodiment, the method comprises acquiring knowledge of the sequence (e.g., a mutation) of an SCD target position in said subject. In an embodiment, the method comprises acquiring knowledge of the sequence (e.g., a mutation) of an SCD target position in said subject by sequencing the HBB gene or a portion of the HBB gene. In an embodiment, the method comprises correcting a mutation at an SCD target position in the HBB gene. In an embodiment, the method comprises correcting a mutation at an SCD target position in the HBB gene by HDR.

[1148] When the method comprises correcting the mutation at an SCD target position by HDR, a Cas9 of (b), at least one gRNA molecule, e.g., a gRNA molecule of (a) and a template nucleic acid of (d) are included in the contacting step. In an embodiment, a cell of the subject is contacted ex vivo with (a), (b), (d) and optionally (c)(i), further optionally (c)(ii), and still further optionally (c)(iii). In another embodiment, said cell is returned to the subject's body. In an embodiment, a cell of the subject is contacted is in vivo with (a), (b), (d) and optionally (c)(i), further optionally (c)(ii), and still further optionally (c)(iii). In an embodiment, the cell of the subject is contacted in vivo by intravenous delivery of (a), (b), (d) and optionally (c)(i), further optionally (c)(ii), and still further optionally (c)(iii). In an embodiment, the cell of the subject is contacted in vivo by intramuscular delivery of (a), (b), (d) and optionally (c)(i), further optionally (c)(ii), and still further optionally (c)(iii). In an embodiment, the cell of the subject is contacted in vivo by subcutaneous delivery of (a), (b), (d) and optionally (c)(i), further optionally (c)(ii), and still further optionally (c)(iii). In an embodiment, the cell of the subject is contacted in vivo by intra-bone marrow (IBM) delivery of (a), (b), (d) and optionally (c)(i), further optionally (c)(ii), and still further optionally (c)(iii).

[1149] In an embodiment, contacting comprises contacting the subject with a nucleic acid, e.g., a vector, e.g., an AAV vector, described herein, e.g., a nucleic acid that encodes at least one of (a), (b), (d) and optionally (c)(i), further optionally (c)(ii), and still further optionally (c)(iii).

[1150] In an embodiment, contacting comprises delivering to said subject said Cas9 molecule of (b), as a protein or mRNA, and a nucleic acid which encodes (a), a nucleic acid of (d) and optionally (c)(i), further optionally (c)(ii), and still further optionally (c)(iii).

[1151] In an embodiment, contacting comprises delivering to the subject the Cas9 molecule of (b), as a protein or mRNA, the gRNA molecule of (a), as an RNA, a nucleic acid of (d) and optionally the second, third and/or fourth gRNA molecule of (c), as an RNA.

[1152] In an embodiment, contacting comprises delivering to the subject the gRNA molecule of (a), as an RNA, optionally said second, third and/or fourth gRNA molecule of (c), as an RNA, a nucleic acid that encodes the Cas9 molecule of (b), and a nucleic acid of (d).

[1153] In an embodiment, a cell of the subject is contacted ex vivo with (a), (b) and optionally (c)(i), further optionally (c)(ii), and still further optionally (c)(iii). In an embodiment, said cell is returned to the subject's body.

[1154] In an embodiment, a populations of cells from a subject is contacted ex vivo with (a), (b) and optionally (c) to correct the E6V mutation in the HBB gene and a second population of cells from the subject is contacted ex vivo with (a), (b) and optionally (c) to introduce a mutation in a second gene, e.g., the BCL11A gene, or to knockout or knock down a second gene, e.g., the BCL11A gene. A mixture of the two cell populations may be returned to the subject's body to treat or prevent SCD.

[1155] In an embodiment, a cell of the subject is contacted is in vivo with (a), (b) and optionally (c)(i), further optionally (c)(ii), and still further optionally (c)(iii). In an embodiment, the cell of the subject is contacted in vivo by intravenous delivery of (a), (b) and optionally (c)(i), further optionally (c)(ii), and still further optionally (c)(iii). In an embodiment, the cell of the subject is contacted in vivo by intramuscular delivery of (a), (b) and optionally (c)(i), further optionally (c)(ii), and still further optionally (c)(iii). In an embodiment, the cell of the subject is contacted in vivo by subcutaneous delivery of (a), (b) and optionally (c)(i), further optionally (c)(ii), and still further optionally (c)(iii). In an embodiment, the cell of the subject is contacted in vivo by intra-bone marrow (IBM) delivery of (a), (b) and optionally (c)(i), further optionally (c)(ii), and still further optionally (c)(iii).

[1156] In an embodiment, contacting comprises contacting the subject with a nucleic acid, e.g., a vector, e.g., an AAV vector, described herein, e.g., a nucleic acid that encodes at least one of (a), (b), and optionally (c)(i), further optionally (c)(ii), and still further optionally (c)(iii).

[1157] In an embodiment, contacting comprises delivering to said subject said Cas9 molecule of (b), as a protein or mRNA, and a nucleic acid which encodes (a) and optionally (c)(i), further optionally (c)(ii), and still further optionally (c)(iii).

[1158] In an embodiment, contacting comprises delivering to the subject the Cas9 molecule of (b), as a protein or mRNA, the gRNA molecule of (a), as an RNA, and optionally the second, third and/or fourth gRNA molecule of (c), as an RNA.

[1159] In an embodiment, contacting comprises delivering to the subject the gRNA molecule of (a), as an RNA, optionally said second, third and/or fourth gRNA molecule of (c), as an RNA, and a nucleic acid that encodes the Cas9 molecule of (b).

[1160] In one embodiment, disclosed herein are kits comprising compositions of the invention and instructions for use.

### Ex Vivo Delivery

[1161] In some embodiments, components described in Table 6 are introduced into cells which are then introduced into the subject. Methods of introducing the components can include, e.g., any of the delivery methods described in Table 7.

### VIII. Modified Nucleosides, Nucleotides, and Nucleic Acids

[1162] Modified nucleosides and modified nucleotides can be present in nucleic acids, e.g., particularly gRNA molecule, but also other forms of RNA, e.g., mRNA, RNAi, or siRNA. As described herein, “nucleoside” is defined as a compound containing a five-carbon sugar molecule (a pentose or ribose) or derivative thereof, and an organic base, purine or pyrimidine, or a derivative thereof. As described herein, “nucleotide” is defined as a nucleoside further comprising a phosphate group.

[1163] Modified nucleosides and nucleotides can include one or more of:

[1164] (i) alteration, e.g., replacement, of one or both of the non-linking phosphate oxygens and/or of one or more of the linking phosphate oxygens in the phosphodiester backbone linkage;

[1165] (ii) alteration, e.g., replacement, of a constituent of the ribose sugar, e.g., of the 2′ hydroxyl on the ribose sugar;

[1166] (iii) wholesale replacement of the phosphate moiety with “dephospho” linkers;

[1167] (iv) modification or replacement of a naturally occurring nucleobase;

[1168] (v) replacement or modification of the ribose-phosphate backbone;

[1169] (vi) modification of the 3′ end or 5′ end of the oligonucleotide, e.g., removal, modification or replacement of a terminal phosphate group or conjugation of a moiety; and

[1170] (vii) modification of the sugar.

[1171] The modifications listed above can be combined to provide modified nucleosides and nucleotides that can have two, three, four, or more modifications. For example, a modified nucleoside or nucleotide can have a modified sugar and a modified nucleobase. In an embodiment, every base of a gRNA is modified, e.g., all bases have a modified phosphate group, e.g., all are phosphorothioate groups. In an embodiment, all, or substantially all, of the phosphate groups of a unimolecular (or chimeric) or modular gRNA molecule are replaced with phosphorothioate groups.

[1172] In an embodiment, modified nucleotides, e.g., nucleotides having modifications as described herein, can be incorporated into a nucleic acid, e.g., a “modified nucleic acid.” In an embodiment, the modified nucleic acids comprise one, two, three or more modified nucleotides. In an embodiment, at least 5% (e.g., at least about 5%, at least about 10%, at least about 15%, at least about 20%, at least about 25%, at least about 30%, at least about 35%, at least about 40%, at least about 45%, at least about 50%, at least about 55%, at least about 60%, at least about 65%, at least about 70%, at least about 75%, at least about 80%, at least about 85%, at least about 90%, at least about 95%, or about 100%) of the positions in a modified nucleic acid are a modified nucleotides.

[1173] Unmodified nucleic acids can be prone to degradation by, e.g., cellular nucleases. For example, nucleases can hydrolyze nucleic acid phosphodiester bonds. Accordingly, in one aspect the modified nucleic acids described herein can contain one or more modified nucleosides or nucleotides, e.g., to introduce stability toward nucleases.

[1174] In an embodiment, the modified nucleosides, modified nucleotides, and modified nucleic acids described herein can exhibit a reduced innate immune response when introduced into a population of cells, both in vivo and ex vivo. The term “innate immune response” includes a cellular response to exogenous nucleic acids, including single stranded nucleic acids, generally of viral or bacterial origin, which involves the induction of cytokine expression and release, particularly the interferons, and cell death. In an embodiment, the modified nucleosides, modified nucleotides, and modified nucleic acids described herein can disrupt binding of a major groove interacting partner with the nucleic acid. In an embodiment, the modified nucleosides, modified nucleotides, and modified nucleic acids described herein can exhibit a reduced innate immune response when introduced into a population of cells, both in vivo and ex vivo, and also disrupt binding of a major groove interacting partner with the nucleic acid.

### Definitions of Chemical Groups

[1175] As used herein, “alkyl” is meant to refer to a saturated hydrocarbon group which is straight-chained or branched. Example alkyl groups include methyl (Me), ethyl (Et), propyl (e.g., n-propyl and isopropyl), butyl (e.g., n-butyl, isobutyl, t-butyl), pentyl (e.g., n-pentyl, isopentyl, neopentyl), and the like. An alkyl group can contain from 1 to about 20, from 2 to about 20, from 1 to about 12, from 1 to about 8, from 1 to about 6, from 1 to about 4, or from 1 to about 3 carbon atoms.

[1176] As used herein, “aryl” refers to monocyclic or polycyclic (e.g., having 2, 3 or 4 fused rings) aromatic hydrocarbons such as, for example, phenyl, naphthyl, anthracenyl, phenanthrenyl, indanyl, indenyl, and the like. In an embodiment, aryl groups have from 6 to about 20 carbon atoms.

[1177] As used herein, “alkenyl” refers to an aliphatic group containing at least one double bond.

[1178] As used herein, “alkynyl” refers to a straight or branched hydrocarbon chain containing 2-12 carbon atoms and characterized in having one or more triple bonds. Examples of alkynyl groups include, but are not limited to, ethynyl, propargyl, and 3-hexynyl.

[1179] As used herein, “arylalkyl” or “aralkyl” refers to an alkyl moiety in which an alkyl hydrogen atom is replaced by an aryl group. Aralkyl includes groups in which more than one hydrogen atom has been replaced by an aryl group. Examples of “arylalkyl” or “aralkyl” include benzyl, 2-phenylethyl, 3-phenylpropyl, 9-fluorenyl, benzhydryl, and trityl groups.

[1180] As used herein, “cycloalkyl” refers to a cyclic, bicyclic, tricyclic, or polycyclic non-aromatic hydrocarbon groups having 3 to 12 carbons. Examples of cycloalkyl moieties include, but are not limited to, cyclopropyl, cyclopentyl, and cyclohexyl.

[1181] As used herein, “heterocyclyl” refers to a monovalent radical of a heterocyclic ring system. Representative heterocyclyls include, without limitation, tetrahydrofuranyl, tetrahydrothienyl, pyrrolidinyl, pyrrolidonyl, piperidinyl, pyrrolinyl, piperazinyl, dioxanyl, dioxolanyl, diazepinyl, oxazepinyl, thiazepinyl, and morpholinyl.

[1182] As used herein, “heteroaryl” refers to a monovalent radical of a heteroaromatic ring system. Examples of heteroaryl moieties include, but are not limited to, imidazolyl, oxazolyl, thiazolyl, triazolyl, pyrrolyl, furanyl, indolyl, thiophenyl pyrazolyl, pyridinyl, pyrazinyl, pyridazinyl, pyrimidinyl, indolizinyl, purinyl, naphthyridinyl, quinolyl, and pteridinyl.

[1183] Phosphate Backbone Modifications

[1184] Phosphate Group

[1185] In an embodiment, the phosphate group of a modified nucleotide can be modified by replacing one or more of the oxygens with a different substituent. Further, the modified nucleotide, e.g., modified nucleotide present in a modified nucleic acid, can include the wholesale replacement of an unmodified phosphate moiety with a modified phosphate as described herein. In an embodiment, the modification of the phosphate backbone can include alterations that result in either an uncharged linker or a charged linker with unsymmetrical charge distribution.

[1186] Examples of modified phosphate groups include, phosphorothioate, phosphoroselenates, borano phosphates, borano phosphate esters, hydrogen phosphonates, phosphoroamidates, alkyl or aryl phosphonates and phosphotriesters. In an embodiment, one of the non-bridging phosphate oxygen atoms in the phosphate backbone moiety can be replaced by any of the following groups: sulfur (S), selenium (Se), BR3 (wherein R can be, e.g., hydrogen, alkyl, or aryl), C (e.g., an alkyl group, an aryl group, and the like), H, NR₂ (wherein R can be, e.g., hydrogen, alkyl, or aryl), or OR (wherein R can be, e.g., alkyl or aryl). The phosphorous atom in an unmodified phosphate group is achiral. However, replacement of one of the non-bridging oxygens with one of the above atoms or groups of atoms can render the phosphorous atom chiral; that is to say that a phosphorous atom in a phosphate group modified in this way is a stereogenic center. The stereogenic phosphorous atom can possess either the “R” configuration (herein Rp) or the “S” configuration (herein Sp).

[1187] Phosphorodithioates have both non-bridging oxygens replaced by sulfur. The phosphorus center in the phosphorodithioates is achiral which precludes the formation of oligoribonucleotide diastereomers. In an embodiment, modifications to one or both non-bridging oxygens can also include the replacement of the non-bridging oxygens with a group independently selected from S, Se, B, C, H, N, and OR (R can be, e.g., alkyl or aryl).

[1188] The phosphate linker can also be modified by replacement of a bridging oxygen, (i.e., the oxygen that links the phosphate to the nucleoside), with nitrogen (bridged phosphoroamidates), sulfur (bridged phosphorothioates) and carbon (bridged methylenephosphonates). The replacement can occur at either linking oxygen or at both of the linking oxygens.

[1189] Replacement of the Phosphate Group

[1190] The phosphate group can be replaced by non-phosphorus containing connectors. In an embodiment, the charge phosphate group can be replaced by a neutral moiety.

[1191] Examples of moieties which can replace the phosphate group can include, without limitation, e.g., methyl phosphonate, hydroxylamino, siloxane, carbonate, carboxymethyl, carbamate, amide, thioether, ethylene oxide linker, sulfonate, sulfonamide, thioformacetal, formacetal, oxime, methyleneimino, methylenemethylimino, methylenehydrazo, methylenedimethylhydrazo and methyleneoxymethylimino.

[1192] Replacement of the Ribophosphate Backbone

[1193] Scaffolds that can mimic nucleic acids can also be constructed wherein the phosphate linker and ribose sugar are replaced by nuclease resistant nucleoside or nucleotide surrogates. In an embodiment, the nucleobases can be tethered by a surrogate backbone. Examples can include, without limitation, the morpholino, cyclobutyl, pyrrolidine and peptide nucleic acid (PNA) nucleoside surrogates.

[1194] Sugar Modifications

[1195] The modified nucleosides and modified nucleotides can include one or more modifications to the sugar group. For example, the 2′ hydroxyl group (OH) can be modified or replaced with a number of different “oxy” or “deoxy” substituents. In an embodiment, modifications to the 2′ hydroxyl group can enhance the stability of the nucleic acid since the hydroxyl can no longer be deprotonated to form a 2′-alkoxide ion. The 2′-alkoxide can catalyze degradation by intramolecular nucleophilic attack on the linker phosphorus atom.

[1196] Examples of “oxy”-2′ hydroxyl group modifications can include alkoxy or aryloxy (OR, wherein “R” can be, e.g., alkyl, cycloalkyl, aryl, aralkyl, heteroaryl or a sugar); polyethyleneglycols (PEG), O(CH₂CH₂O)ₙCH₂CH₂OR wherein R can be, e.g., H or optionally substituted alkyl, and n can be an integer from 0 to 20 (e.g., from 0 to 4, from 0 to 8, from 0 to 10, from 0 to 16, from 1 to 4, from 1 to 8, from 1 to 10, from 1 to 16, from 1 to 20, from 2 to 4, from 2 to 8, from 2 to 10, from 2 to 16, from 2 to 20, from 4 to 8, from 4 to 10, from 4 to 16, and from 4 to 20). In an embodiment, the “oxy”-2′ hydroxyl group modification can include “locked” nucleic acids (LNA) in which the 2′ hydroxyl can be connected, e.g., by a C1-6 alkylene or C1-6 heteroalkylene bridge, to the 4′ carbon of the same ribose sugar, where exemplary bridges can include methylene, propylene, ether, or amino bridges; O-amino (wherein amino can be, e.g., NH₂; alkylamino, dialkylamino, heterocyclyl, arylamino, diarylamino, heteroarylamino, or diheteroarylamino, ethylenediamine, or polyamino) and aminoalkoxy, O(CH₂)ₙ-amino, (wherein amino can be, e.g., NH₂; alkylamino, dialkylamino, heterocyclyl, arylamino, diarylamino, heteroarylamino, or diheteroarylamino, ethylenediamine, or polyamino). In an embodiment, the “oxy”-2′ hydroxyl group modification can include the methoxyethyl group (MOE), (OCH₂CH₂OCH₃, e.g., a PEG derivative).

[1197] “Deoxy” modifications can include hydrogen (i.e. deoxyribose sugars, e.g., at the overhang portions of partially ds RNA); halo (e.g., bromo, chloro, fluoro, or iodo); amino (wherein amino can be, e.g., NH₂; alkylamino, dialkylamino, heterocyclyl, arylamino, diarylamino, heteroarylamino, diheteroarylamino, or amino acid); NH(CH₂CH₂NH)ₙCH₂CH₂-amino (wherein amino can be, e.g., as described herein), —NHC(O)R (wherein R can be, e.g., alkyl, cycloalkyl, aryl, aralkyl, heteroaryl or sugar), cyano; mercapto; alkyl-thio-alkyl; thioalkoxy; and alkyl, cycloalkyl, aryl, alkenyl and alkynyl, which may be optionally substituted with e.g., an amino as described herein.

[1198] The sugar group can also contain one or more carbons that possess the opposite stereochemical configuration than that of the corresponding carbon in ribose. Thus, a modified nucleic acid can include nucleotides containing e.g., arabinose, as the sugar. The nucleotide “monomer” can have an alpha linkage at the 1′ position on the sugar, e.g., alpha-nucleosides. The modified nucleic acids can also include “abasic” sugars, which lack a nucleobase at C-1′. These abasic sugars can also be further modified at one or more of the constituent sugar atoms. The modified nucleic acids can also include one or more sugars that are in the L form, e.g., L-nucleosides.

[1199] Generally, RNA includes the sugar group ribose, which is a 5-membered ring having an oxygen. Exemplary modified nucleosides and modified nucleotides can include, without limitation, replacement of the oxygen in ribose (e.g., with sulfur (S), selenium (Se), or alkylene, such as, e.g., methylene or ethylene); addition of a double bond (e.g., to replace ribose with cyclopentenyl or cyclohexenyl); ring contraction of ribose (e.g., to form a 4-membered ring of cyclobutane or oxetane); ring expansion of ribose (e.g., to form a 6- or 7-membered ring having an additional carbon or heteroatom, such as for example, anhydrohexitol, altritol, mannitol, cyclohexanyl, cyclohexenyl, and morpholino that also has a phosphoramidate backbone). In an embodiment, the modified nucleotides can include multicyclic forms (e.g., tricyclo; and “unlocked” forms, such as glycol nucleic acid (GNA) (e.g., R-GNA or S-GNA, where ribose is replaced by glycol units attached to phosphodiester bonds), threose nucleic acid (TNA, where ribose is replaced with α-L-threofuranosyl-(3′→2′)).

[1200] Modifications on the Nucleobase

[1201] The modified nucleosides and modified nucleotides described herein, which can be incorporated into a modified nucleic acid, can include a modified nucleobase. Examples of nucleobases include, but are not limited to, adenine (A), guanine (G), cytosine (C), and uracil (U). These nucleobases can be modified or wholly replaced to provide modified nucleosides and modified nucleotides that can be incorporated into modified nucleic acids. The nucleobase of the nucleotide can be independently selected from a purine, a pyrimidine, a purine or pyrimidine analog. In an embodiment, the nucleobase can include, for example, naturally-occurring and synthetic derivatives of a base.

[1202] Uracil

[1203] In an embodiment, the modified nucleobase is a modified uracil. Exemplary nucleobases and nucleosides having a modified uracil include without limitation pseudouridine (ψ), pyridin-4-one ribonucleoside, 5-aza-uridine, 6-aza-uridine, 2-thio-5-aza-uridine, 2-thio-uridine (s2U), 4-thio-uridine (s4U), 4-thio-pseudouridine, 2-thio-pseudouridine, 5-hydroxy-uridine (ho⁵U), 5-aminoallyl-uridine, 5-halo-uridine (e.g., 5-iodo-uridine or 5-bromo-uridine), 3-methyl-uridine (m³U), 5-methoxy-uridine (mo⁵U), uridine 5-oxyacetic acid (cmo⁵U), uridine 5-oxyacetic acid methyl ester (mcmo⁵U), 5-carboxymethyl-uridine (cm⁵U), 1-carboxymethyl-pseudouridine, 5-carboxyhydroxymethyl-uridine (chm⁵U), 5-carboxyhydroxymethyl-uridine methyl ester (mchm⁵U), 5-methoxycarbonylmethyl-uridine (mcm⁵U), 5-methoxycarbonylmethyl-2-thio-uridine (mcm⁵s2U), 5-aminomethyl-2-thio-uridine (nm⁵s2U), 5-methylaminomethyl-uridine (mnm⁵U), 5-methylaminomethyl-2-thio-uridine (mnm⁵s2U), 5-methylaminomethyl-2-seleno-uridine (mnm⁵se²U), 5-carbamoylmethyl-uridine (ncm⁵U), 5-carboxymethylaminomethyl-uridine (cmnm⁵U), 5-carboxymethylaminomethyl-2-thio-uridine (cmnm⁵s2U), 5-propynyl-uridine, 1-propynyl-pseudouridine, 5-taurinomethyl-uridine (τcm⁵U), 1-taurinomethyl-pseudouridine, 5-taurinomethyl-2-thio-uridine(τm⁵s2U), 1-taurinomethyl-4-thio-pseudouridine, 5-methyl-uridine (m⁵U, i.e., having the nucleobase deoxythymine), 1-methyl-pseudouridine (m¹ψ), 5-methyl-2-thio-uridine (m⁵s2U), 1-methyl-4-thio-pseudouridine (m¹s⁴ψ), 4-thio-1-methyl-pseudouridine, 3-methyl-pseudouridine (m³ψ), 2-thio-1-methyl-pseudouridine, 1-methyl-1-deaza-pseudouridine, 2-thio-1-methyl-1-deaza-pseudouridine, dihydrouridine (D), dihydropseudouridine, 5,6-dihydrouridine, 5-methyl-dihydrouridine (m⁵D), 2-thio-dihydrouridine, 2-thio-dihydropseudouridine, 2-methoxy-uridine, 2-methoxy-4-thio-uridine, 4-methoxy-pseudouridine, 4-methoxy-2-thio-pseudouridine, N1-methyl-pseudouridine, 3-(3-amino-3-carboxypropyl)uridine (acp³U), 1-methyl-3-(3-amino-3-carboxypropyl)pseudouridine (acp³ψ), 5-(isopentenylaminomethyl)uridine (inm⁵U), 5-(isopentenylaminomethyl)-2-thio-uridine (inm⁵s2U), α-thio-uridine, 2′-O-methyl-uridine (Um), 5,2′-O-dimethyl-uridine (m⁵Um), 2′-O-methyl-pseudouridine (ψm), 2-thio-2′-O-methyl-uridine (s2Um), 5-methoxycarbonylmethyl-2′-O-methyl-uridine (mcm ⁵Um), 5-carbamoylmethyl-2′-O-methyl-uridine (ncm ⁵Um), 5-carboxymethylaminomethyl-2′-O-methyl-uridine (cmnm ⁵Um), 3,2′-O-dimethyl-uridine (m³Um), 5-(isopentenylaminomethyl)-2′-O-methyl-uridine (inm⁵Um), 1-thio-uridine, deoxythymidine, 2′-F-ara-uridine, 2′-F-uridine, 2′-OH-ara-uridine, 5-(2-carbomethoxyvinyl) uridine, 5-[3-(1-E-propenylamino)uridine, pyrazolo[3,4-d]pyrimidines, xanthine, and hypoxanthine.

[1204] Cytosine

[1205] In an embodiment, the modified nucleobase is a modified cytosine. Exemplary nucleobases and nucleosides having a modified cytosine include without limitation 5-aza-cytidine, 6-aza-cytidine, pseudoisocytidine, 3-methyl-cytidine (m³C), N4-acetyl-cytidine (act), 5-formyl-cytidine (f⁵C), N4-methyl-cytidine (m⁴C), 5-methyl-cytidine (m⁵C), 5-halo-cytidine (e.g., 5-iodo-cytidine), 5-hydroxymethyl-cytidine (hm⁵C), 1-methyl-pseudoisocytidine, pyrrolo-cytidine, pyrrolo-pseudoisocytidine, 2-thio-cytidine (s2C), 2-thio-5-methyl-cytidine, 4-thio-pseudoisocytidine, 4-thio-1-methyl-pseudoisocytidine, 4-thio-1-methyl-1-deaza-pseudoisocytidine, 1-methyl-1-deaza-pseudoisocytidine, zebularine, 5-aza-zebularine, 5-methyl-zebularine, 5-aza-2-thio-zebularine, 2-thio-zebularine, 2-methoxy-cytidine, 2-methoxy-5-methyl-cytidine, 4-methoxy-pseudoisocytidine, 4-methoxy-1-methyl-pseudoisocytidine, lysidine (k²C), α-thio-cytidine, 2′-O-methyl-cytidine (Cm), 5,2′-O-dimethyl-cytidine (m⁵Cm), N4-acetyl-2′-O-methyl-cytidine (ac⁴Cm), N4,2′-O-dimethyl-cytidine (m⁴Cm), 5-formyl-2′-O-methyl-cytidine (f ⁵Cm), N4,N4,2′-O-trimethyl-cytidine (m⁴₂ Cm), 1-thio-cytidine, 2′-F-ara-cytidine, 2′-F-cytidine, and 2′-OH-ara-cytidine.

[1206] Adenine

[1207] In an embodiment, the modified nucleobase is a modified adenine. Exemplary nucleobases and nucleosides having a modified adenine include without limitation 2-amino-purine, 2,6-diaminopurine, 2-amino-6-halo-purine (e.g., 2-amino-6-chloro-purine), 6-halo-purine (e.g., 6-chloro-purine), 2-amino-6-methyl-purine, 8-azido-adenosine, 7-deaza-adenosine, 7-deaza-8-aza-adenosine, 7-deaza-2-amino-purine, 7-deaza-8-aza-2-amino-purine, 7-deaza-2,6-diaminopurine, 7-deaza-8-aza-2,6-diaminopurine, 1-methyl-adenosine (m¹A), 2-methyl-adenosine (m²A), N6-methyl-adenosine (m⁶A), 2-methylthio-N6-methyl-adenosine (ms² m⁶A), N6-isopentenyl-adenosine (i⁶A), 2-methylthio-N6-isopentenyl-adenosine (ms²i⁶A), N6-(cis-hydroxyisopentenyl)adenosine (io⁶A), 2-methylthio-N6-(cis-hydroxyisopentenyl)adenosine (ms²io⁶A), N6-glycinylcarbamoyl-adenosine (g⁶A), N6-threonylcarbamoyl-adenosine (t⁶A), N6-methyl-N6-threonylcarbamoyl-adenosine (m⁶t⁶A), 2-methylthio-N6-threonylcarbamoyl-adenosine (ms²g⁶A), N6,N6-dimethyl-adenosine (m⁶₂A), N6-hydroxynorvalylcarbamoyl-adenosine (hn⁶A), 2-methylthio-N6-hydroxynorvalylcarbamoyl-adenosine (ms²hn⁶A), N6-acetyl-adenosine (ac⁶A), 7-methyl-adenosine, 2-methylthio-adenosine, 2-methoxy-adenosine, α-thio-adenosine, 2′-O-methyl-adenosine (Am), N⁶,2′-O-dimethyl-adenosine (m⁶Am), N⁶-Methyl-T-deoxyadenosine, N6,N6,2′-O-trimethyl-adenosine (m⁶₂Am), 1,2′-O-dimethyl-adenosine (m¹Am), 2′-O-ribosyladenosine (phosphate) (Ar(p)), 2-amino-N6-methyl-purine, 1-thio-adenosine, 8-azido-adenosine, 2′-F-ara-adenosine, 2′-F-adenosine, 2′-OH-ara-adenosine, and N6-(19-amino-pentaoxanonadecyl)-adenosine.

[1208] Guanine

[1209] In an embodiment, the modified nucleobase is a modified guanine. Exemplary nucleobases and nucleosides having a modified guanine include without limitation inosine (I), 1-methyl-inosine (m¹I), wyosine (imG), methylwyosine (mimG), 4-demethyl-wyosine (imG-14), isowyosine (imG2), wybutosine (yW), peroxywybutosine (o₂yW), hydroxywybutosine (OHyW), undermodified hydroxywybutosine (OHyW*), 7-deaza-guanosine, queuosine (Q), epoxyqueuosine (oQ), galactosyl-queuosine (galQ), mannosyl-queuosine (manQ), 7-cyano-7-deaza-guanosine (preQ₀), 7-aminomethyl-7-deaza-guanosine (preQ₁), archaeosine (G⁺), 7-deaza-8-aza-guanosine, 6-thio-guanosine, 6-thio-7-deaza-guanosine, 6-thio-7-deaza-8-aza-guanosine, 7-methyl-guanosine (m⁷G), 6-thio-7-methyl-guanosine, 7-methyl-inosine, 6-methoxy-guanosine, 1-methyl-guanosine (m′G), N2-methyl-guanosine (m²G), N2,N2-dimethyl-guanosine (m² 2 G), N2,7-dimethyl-guanosine (m²,7G), N2, N2,7-dimethyl-guanosine (m²,2,7G), 8-oxo-guanosine, 7-methyl-8-oxo-guanosine, 1-methyl-6-thio-guanosine, N2-methyl-6-thio-guanosine, N2,N2-dimethyl-6-thio-guanosine, α-thio-guanosine, 2′-O-methyl-guanosine (Gm), N2-methyl-2′-O-methyl-guanosine (m²Gm), N2,N2-dimethyl-2′-O-methyl-guanosine (m² 2 Gm), 1-methyl-2′-O-methyl-guanosine (m′Gm), N2,7-dimethyl-2′-O-methyl-guanosine (m²,7Gm), 2′-O-methyl-inosine (Im), 1,2′-O-dimethyl-inosine (m′Im), O⁶-phenyl-2′-deoxyinosine, 2′-O-ribosylguanosine (phosphate) (Gr(p)), 1-thio-guanosine, O⁶-methyl-guanosine, O⁶-Methyl-2′-deoxyguanosine, 2′-F-ara-guanosine, and 2′-F-guanosine.

### Exemplary Modified gRNAs

[1210] In some embodiments, the modified nucleic acids can be modified gRNAs. It is to be understood that any of the gRNAs described herein can be modified in accordance with this section, including any gRNAs that comprises a targeting domain from SEQ ID NOs: 387-485, 6803-6871, and 16010-16256.

[1211] As discussed above, transiently expressed or delivered nucleic acids can be prone to degradation by, e.g., cellular nucleases. Accordingly, in one aspect the modified gRNAs described herein can contain one or more modified nucleosides or nucleotides which introduce stability toward nucleases. While not wishing to be bound by theory it is also believed that certain modified gRNAs described herein can exhibit a reduced innate immune response when introduced into a population of cells, particularly the cells of the present disclosure. As noted above, the term “innate immune response” includes a cellular response to exogenous nucleic acids, including single stranded nucleic acids, generally of viral or bacterial origin, which involves the induction of cytokine expression and release, particularly the interferons, and cell death.

[1212] While some of the exemplary modification discussed in this section may be included at any position within the gRNA sequence, in some embodiments, a gRNA molecule comprises a modification at or near its 5′ end (e.g., within 1-10, 1-5, or 1-2 nucleotides of its 5′ end). In some embodiments, a gRNA comprises a modification at or near its 3′ end (e.g., within 1-10, 1-5, or 1-2 nucleotides of its 3′ end). In some embodiments, a gRNA molecule comprises both a modification at or near its 5′ end and a modification at or near its 3′ end.

[1213] In an embodiment, the 5′ end of a gRNA is modified by the inclusion of a eukaryotic mRNA cap structure or cap analog (e.g., a G(5′) ppp(5′) G cap analog, a m7G(5′)ppp(5′)G cap analog, or a 3′-O-Me-m7G(5′) ppp(5′) G anti reverse cap analog (ARCA)). The cap or cap analog can be included during either chemical synthesis or in vitro transcription of the gRNA.

[1214] In an embodiment, an in vitro transcribed gRNA is modified by treatment with a phosphatase (e.g., calf intestinal alkaline phosphatase) to remove the 5′ triphosphate group.

[1215] In an embodiment, the 3′ end of a gRNA is modified by the addition of one or more (e.g., 25-200) adenine (A) residues. The polyA tract can be contained in the nucleic acid (e.g., plasmid, PCR product, viral genome) encoding the gRNA, or can be added to the gRNA during chemical synthesis, or following in vitro transcription using a polyadenosine polymerase (e.g., E. coli Poly(A)Polymerase).

[1216] In another aspect, methods and compositions discussed herein provide methods and compositions for gene editing by using a gRNA molecule which comprises a polyA tail. In one embodiment, a polyA tail of undefined length ranging from 1 to 1000 nucleotide is added enzymatically using a polymerase such as E. coli polyA polymerase (E-PAP). In one embodiment, the polyA tail of a specified length (e.g., 1, 5, 10, 20, 30, 40, 50, 60, 100, or 150 nucleotides) is encoded on a DNA template and transcribed with the gRNA via an RNA polymerase (e.g., T7 RNA polymerase). In one embodiment, a polyA tail of defined length (e.g., 1, 5, 10, 20, 30, 40, 50, 60, 100, or 150 nucleotides) is synthesized as a synthetic oligonucleotide and ligated on the 3′ end of the gRNA with either an RNA ligase or a DNA ligase with our without a splinted DNA oligonucleotide complementary to the guide RNA and the polyA oligonucleotide. In one embodiment, the entire gRNA including a defined length of polyA tail is made synthetically, in one or several pieces, and ligated together by either an RNA ligase or a DNA ligase with or without a splinted DNA oligonucleotide.

[1217] In an embodiment, in vitro transcribed gRNA molecule contains both a 5′ cap structure or cap analog and a 3′ polyA tract. In an embodiment, an in vitro transcribed gRNA is modified by treatment with a phosphatase (e.g., calf intestinal alkaline phosphatase) to remove the 5′ triphosphate group and comprises a 3′ polyA tract.

[1218] In some embodiments, gRNAs can be modified at a 3′ terminal U ribose. For example, the two terminal hydroxyl groups of the U ribose can be oxidized to aldehyde groups and a concomitant opening of the ribose ring to afford a modified nucleoside as shown below:

[chemical structure]

wherein “U” can be an unmodified or modified uridine.

[1219] In another embodiment, the 3′ terminal U can be modified with a 2′3′ cyclic phosphate as shown below:

[chemical structure]

wherein “U” can be an unmodified or modified uridine.

[1220] In some embodiments, the gRNA molecules may contain 3′ nucleotides which can be stabilized against degradation, e.g., by incorporating one or more of the modified nucleotides described herein. In this embodiment, e.g., uridines can be replaced with modified uridines, e.g., 5-(2-amino)propyl uridine, and 5-bromo uridine, or with any of the modified uridines described herein; adenosines and guanosines can be replaced with modified adenosines and guanosines, e.g., with modifications at the 8-position, e.g., 8-bromo guanosine, or with any of the modified adenosines or guanosines described herein.

[1221] In some embodiments, sugar-modified ribonucleotides can be incorporated into the gRNA molecule, e.g., wherein the 2′ OH-group is replaced by a group selected from H, —OR, —R (wherein R can be, e.g., alkyl, cycloalkyl, aryl, aralkyl, heteroaryl or sugar), halo, —SH, —SR (wherein R can be, e.g., alkyl, cycloalkyl, aryl, aralkyl, heteroaryl or sugar), amino (wherein amino can be, e.g., NH₂; alkylamino, dialkylamino, heterocyclyl, arylamino, diarylamino, heteroarylamino, diheteroarylamino, or amino acid); or cyano (—CN). In some embodiments, the phosphate backbone can be modified as described herein, e.g., with a phosphothioate group. In some embodiments, one or more of the nucleotides of the gRNA can each independently be a modified or unmodified nucleotide including, but not limited to 2′-sugar modified, such as, 2′-O-methyl, 2′-O-methoxyethyl, or 2′-Fluoro modified including, e.g., 2′-F or 2′-O-methyl, adenosine (A), 2′-F or 2′-O-methyl, cytidine (C), 2′-F or 2′-O-methyl, uridine (U), 2′-F or 2′-O-methyl, thymidine (T), 2′-F or 2′-O-methyl, guano sine (G), 2′-O-methoxyethyl-5-methyluridine (Teo), 2′-O-methoxyethyladenosine (Aeo), 2′-O-methoxyethyl-5-methylcytidine (m5Ceo), and any combinations thereof.

[1222] In some embodiments, a gRNA can include “locked” nucleic acids (LNA) in which the 2′ OH-group can be connected, e.g., by a C1-6 alkylene or C1-6 heteroalkylene bridge, to the 4′ carbon of the same ribose sugar, where exemplary bridges can include methylene, propylene, ether, or amino bridges; O-amino (wherein amino can be, e.g., NH₂; alkylamino, dialkylamino, heterocyclyl, arylamino, diarylamino, heteroarylamino, or diheteroarylamino, ethylenediamine, or polyamino) and aminoalkoxy or O(CH₂)ₙ-amino (wherein amino can be, e.g., NH₂; alkylamino, dialkylamino, heterocyclyl, arylamino, diarylamino, heteroarylamino, or diheteroarylamino, ethylenediamine, or polyamino).

[1223] In some embodiments, a gRNA can include a modified nucleotide which is multicyclic (e.g., tricyclo; and “unlocked” forms, such as glycol nucleic acid (GNA) (e.g., R-GNA or S-GNA, where ribose is replaced by glycol units attached to phosphodiester bonds), or threose nucleic acid (TNA, where ribose is replaced with α-L-threofuranosyl-(3′—>2′)).

[1224] Generally, gRNA molecules include the sugar group ribose, which is a 5-membered ring having an oxygen. Exemplary modified gRNAs can include, without limitation, replacement of the oxygen in ribose (e.g., with sulfur (S), selenium (Se), or alkylene, such as, e.g., methylene or ethylene); addition of a double bond (e.g., to replace ribose with cyclopentenyl or cyclohexenyl); ring contraction of ribose (e.g., to form a 4-membered ring of cyclobutane or oxetane); ring expansion of ribose (e.g., to form a 6- or 7-membered ring having an additional carbon or heteroatom, such as for example, anhydrohexitol, altritol, mannitol, cyclohexanyl, cyclohexenyl, and morpholino that also has a phosphoramidate backbone). Although the majority of sugar analog alterations are localized to the 2′ position, other sites are amenable to modification, including the 4′ position. In an embodiment, a gRNA comprises a 4′-S, 4′-Se or a 4′-C-aminomethyl-2′-O-Me modification.

[1225] In some embodiments, deaza nucleotides, e.g., 7-deaza-adenosine, can be incorporated into the gRNA molecule. In some embodiments, 0- and N-alkylated nucleotides, e.g., N6-methyl adenosine, can be incorporated into the gRNA molecule. In some embodiments, one or more or all of the nucleotides in a gRNA molecule are deoxynucleotides.

[1226] miRNA Binding Sites

[1227] microRNAs (or miRNAs) are naturally occurring cellular 19-25 nucleotide long noncoding RNAs. They bind to nucleic acid molecules having an appropriate miRNA binding site, e.g., in the 3′ UTR of an mRNA, and down-regulate gene expression. While not wishing to be bound by theory it is believed that this down regulation occurs either by reducing nucleic acid molecule stability or by inhibiting translation. An RNA species disclosed herein, e.g., an mRNA encoding Cas9 can comprise an miRNA binding site, e.g., in its 3′UTR. The miRNA binding site can be selected to promote down regulation of expression is a selected cell type. By way of example, the incorporation of a binding site for miR-122, a microRNA abundant in liver, can inhibit the expression of the gene of interest in the liver.

### EXAMPLES

[1228] The following Examples are merely illustrative and are not intended to limit the scope or content of the invention in any way.

### Example 1: Cloning and Initial Screening of gRNA Molecules

[1229] The suitability of candidate gRNA molecules can be evaluated as described in this example. Although described for a chimeric gRNA molecule, the approach can also be used to evaluate modular gRNA molecules.

[1230] Cloning gRNAs into Vectors

[1231] For each gRNA molecule, a pair of overlapping oligonucleotides is designed and obtained. Oligonucleotides are annealed and ligated into a digested vector backbone containing an upstream U6 promoter and the remaining sequence of a long chimeric gRNA molecule. Plasmid is sequence-verified and prepped to generate sufficient amounts of transfection-quality DNA. Alternate promoters maybe used to drive in vivo transcription (e.g., H1 promoter) or for in vitro transcription (e.g., a T7 promoter).

[1232] Cloning gRNAs in Linear dsDNA Molecule (STITCHR)

[1233] For each gRNA molecule, a single oligonucleotide is designed and obtained. The U6 promoter and the gRNA scaffold (e.g., including everything except the targeting domain, e.g., including sequences derived from the crRNA and tracrRNA, e.g., including a first complementarity domain; a linking domain; a second complementarity domain; a proximal domain; and a tail domain) are separately PCR amplified and purified as dsDNA molecules. The gRNA-specific oligonucleotide is used in a PCR reaction to stitch together the U6 and the gRNA scaffold, linked by the targeting domain specified in the oligonucleotide. Resulting dsDNA molecule (STITCHR product) is purified for transfection. Alternate promoters may be used to drive in vivo transcription (e.g., H1 promoter) or for in vitro transcription (e.g., T7 promoter). Any gRNA scaffold may be used to create gRNAs compatible with Cas9s from any bacterial species.

[1234] Initial gRNA Screen

[1235] Each gRNA to be tested is transfected, along with a plasmid expressing Cas9 and a small amount of a GFP-expressing plasmid into human cells. In preliminary experiments, these cells can be immortalized human cell lines such as 293T, K562 or U20S. Alternatively, primary human cells may be used. In this case, cells may be relevant to the eventual therapeutic cell target (for example, an erythroid cell). The use of primary cells similar to the potential therapeutic target cell population may provide important information on gene targeting rates in the context of endogenous chromatin and gene expression.

[1236] Transfection may be performed using lipid transfection (such as Lipofectamine or Fugene) or by electroporation (such as Lonza Nucleofection). Following transfection, GFP expression can be determined either by fluorescence microscopy or by flow cytometry to confirm consistent and high levels of transfection. These preliminary transfections can comprise different gRNAs and different targeting approaches (17-mers, 20-mers, nuclease, dual-nickase, etc.) to determine which gRNAs/combinations of gRNAs give the greatest activity.

[1237] Efficiency of cleavage with each gRNA may be assessed by measuring NHEJ-induced indel formation at the target locus by a T7E1-type assay or by sequencing. Alternatively, other mismatch-sensitive enzymes, such as Cell/Surveyor nuclease, may also be used.

[1238] For the T7E1 assay, PCR amplicons are approximately 500-700 bp with the intended cut site placed asymmetrically in the amplicon. Following amplification, purification and size-verification of PCR products, DNA is denatured and re-hybridized by heating to 95° C. and then slowly cooling. Hybridized PCR products are then digested with T7 Endonuclease I (or other mismatch-sensitive enzyme) which recognizes and cleaves non-perfectly matched DNA. If indels are present in the original template DNA, when the amplicons are denatured and re-annealed, this results in the hybridization of DNA strands harboring different indels and therefore lead to double-stranded DNA that is not perfectly matched. Digestion products may be visualized by gel electrophoresis or by capillary electrophoresis. The fraction of DNA that is cleaved (density of cleavage products divided by the density of cleaved and uncleaved) may be used to estimate a percent NHEJ using the following equation: % NHEJ=(1-(1-fraction cleaved)^{1/2}). The T7E1 assay is sensitive down to about 2-5% NHEJ.

[1239] Sequencing may be used instead of, or in addition to, the T7E1 assay. For Sanger sequencing, purified PCR amplicons are cloned into a plasmid backbone, transformed, miniprepped and sequenced with a single primer. Sanger sequencing may be used for determining the exact nature of indels after determining the NHEJ rate by T7E1.

[1240] Sequencing may also be performed using next generation sequencing techniques. When using next generation sequencing, amplicons may be 300-500 bp with the intended cut site placed asymmetrically. Following PCR, next generation sequencing adapters and barcodes (for example Illumina multiplex adapters and indexes) may be added to the ends of the amplicon, e.g., for use in high throughput sequencing (for example on an Illumina MiSeq). This method allows for detection of very low NHEJ rates.

### Example 2: Assessment of Gene Targeting by NHEJ

[1241] The gRNAs that induce the greatest levels of NHEJ in initial tests can be selected for further evaluation of gene targeting efficiency. In this case, cells are derived from disease subjects and, therefore, harbor the relevant mutation.

[1242] Following transfection (usually 2-3 days post-transfection) genomic DNA may be isolated from a bulk population of transfected cells and PCR may be used to amplify the target region. Following PCR, gene targeting efficiency to generate the desired mutations (either knockout of a target gene or removal of a target sequence motif) may be determined by sequencing. For Sanger sequencing, PCR amplicons may be 500-700 bp long. For next generation sequencing, PCR amplicons may be 300-500 bp long. If the goal is to knockout gene function, sequencing may be used to assess what percent of alleles have undergone NHEJ-induced indels that result in a frameshift or large deletion or insertion that would be expected to destroy gene function. If the goal is to remove a specific sequence motif, sequencing may be used to assess what percent of alleles have undergone NHEJ-induced deletions that span this sequence.

### Example 3: Assessment of Gene Targeting by HDR

[1243] The gRNAs that induce the greatest levels of NHEJ in initial tests can be selected for further evaluation of gene targeting efficiency. In this case, cells are derived from disease subjects and, therefore, harbor the relevant mutation.

[1244] Following transfection (usually 2-3 days post-transfection) genomic DNA may be isolated from a bulk population of transfected cells and PCR may be used to amplify the target region. Following PCR, gene targeting efficiency can be determined by several methods.

[1245] Determination of gene targeting frequency involves measuring the percentage of alleles that have undergone homologous directed repair (HDR) with the exogenously provided donor template or endogenous genomic donor sequence and which therefore have incorporated the desired correction. If the desired HDR event creates or destroys a restriction enzyme site, the frequency of gene targeting may be determined by a RFLP assay. If no restriction site is created or destroyed, sequencing may be used to determine gene targeting frequency. If a RFLP assay is used, sequencing may still be used to verify the desired HDR event and ensure that no other mutations are present. If an exogenously provided donor template is employed, at least one of the primers is placed in the endogenous gene sequence outside of the region included in the homology arms, which prevents amplification of donor template still present in the cells. Therefore, the length of the homology arms present in the donor template may affect the length of the PCR amplicon. PCR amplicons can either span the entire donor region (both primers placed outside the homology arms) or they can span only part of the donor region and a single junction between donor and endogenous DNA (one internal and one external primer). If the amplicons span less than the entire donor region, two different PCRs should be used to amplify and sequence both the 5′ and the 3′ junction.

[1246] If the PCR amplicon is short (less than 600 bp) it is possible to use next generation sequencing. Following PCR, next generation sequencing adapters and barcodes (for example Illumina multiplex adapters and indexes) may be added to the ends of the amplicon, e.g., for use in high throughput sequencing (for example on an Illumina MiSeq). This method allows for detection of very low gene targeting rates.

[1247] If the PCR amplicon is too long for next generation sequencing, Sanger sequencing can be performed. For Sanger sequencing, purified PCR amplicons are cloned into a plasmid backbone (for example, TOPO cloned using the LifeTech Zero Blunt® TOPO® cloning kit), transformed, miniprepped and sequenced.

[1248] The same or similar assays described above can be used to measure the percentage of alleles that have undergone HDR with endogenous genomic donor sequence and which therefore have incorporated the desired correction.

### Example 4: Gene Targeting of the HBB Locus by CRISPR/Cas9 to Investigate Repair Pathway Choice in Response to Different Types of DNA Lesions

[1249] The CRISPR/Cas9 system was used to target the human HBB gene in the region of the sickle cell anemia-causing mutation.

[1250] To examine how the nature of the targeted break affects the frequency of different DNA repair outcomes, blunt double-strand breaks, single-strand nicks, and dual-nicks in which the nicks are placed on opposite strands and leave either 3′ or 5′ overhangs of varying lengths, were introduced by utilizing the wild type Cas9 nuclease, as well as two different Cas9 nickases. Several different DNA repair outcomes including indel mutations resulting from non-homologous end-joining, homology-dependent repair (HDR) using an exogenous donor as a template (i.e., gene correction), and HDR using the closely related HBD gene as an endogenous template (i.e., gene conversion), were characterized using either single-strand oligonucleotide (ssODN) or plasmid DNA donors. The frequency of these various repair outcomes under different conditions offer insight into the mechanisms of DNA repair and how it is impacted by the nature of the DNA break. The data also indicates a therapeutic approach in which correction of the sickle-cell mutation is efficiently mediated through HDR with either a donor template or with the HBD gene.

[1251] In this study different gRNA molecules for the HBB region that surrounds the nucleotides encoding the amino acid most commonly mutated in sickle cell disease had been tested in 293T cells with wild type Cas9 molecule. The gRNAs that induced similar high rates of NHEJ and had PAMs facing in opposite orientations (e.g., each PAM is oriented 5′ relative to a mutation on the first and second strands, respectively) were selected to test as pairs with Cas9 D10A and Cas9 N863A nickases.

[1252] As shown in FIG. 1, the gRNA pair 8/15 (“8gRNA”/“15gRNA” pair) was selected as one of the best pairs of gRNA molecules. “8gRNA” has the targeting domain sequence of GUAACGGCAGACUUCUCCUC (SEQ ID NO: 388) and “15gRNA” has the targeting domain sequence of AAGGUGAACGUGGAUGAAGU (SEQ ID NO: 387). This pair of gRNAs in combination with the mutant Cas9 D10A would generate a 5′ overhang of 47 bp, and in combination with the mutant N863A would generate a 3′ overhang of 47 bp. Different overhang structures are believed to have different properties for engaging different repair mechanisms. To address repair efficacy and repair outcomes in a systematic manner, U2OS cells with respective Cas9 variants and gRNAs were used.

[1253] U2OS cells were electroporated with 200 ng of each gRNA and 750 ng of plasmid that encodes wild type Cas9 or mutant Cas9. Cells were collected 6 days after electroporation and genomic DNA was extracted. PCR amplification of the HBB locus was performed and subcloned into a Topo Blunt Vector. For each condition in each experiment 96 colonies were sequenced with Sanger sequencing. In the experiments assessing HDR efficacy, cells were electroporated with 2.5 ug of single stranded oligo or double stranded oligo in addition to the gRNA and the Cas9-encoding plasmid.

[1254] As shown in FIG. 2, the similar rates of overall modification at the HBB locus were generated using wild type Cas9 or Cas9 nickases (D10A, N863A), as detected by Sanger sequencing, suggesting a similar rate in error prone repair independent of the Cas9-induced DNA lesion.

[1255] FIGS. 3A-3B show that a majority of the total gene editing events (about ¾ of the total) were small deletions (<10 bp). This is consistent with the notion that wild type Cas9 generates a blunt end which are preferentially repaired by canonical NHEJ. In contrast, deletions represented only about a quarter of the total events using either nickase (D10A or N863A). Moreover, larger deletions of ˜50 bp that can be mapped to the region between the two nickase sites were observed (FIG. 3A and 3C). The remaining gene-editing events were substantially different between the two nickases.

[1256] As shown in FIG. 4A, in the case of Cas9 D10A nickase, which leaves a 5′ protruding end, the lesion is mostly repaired through a mechanism defined as gene conversion. In gene conversion, the HBD locus will serve as a template to repair the HBB gene. HBD is a highly similar gene (92% identity with HBB) that does not carry the sickle-cell mutation (FIG. 4B). FIG. 5 shows that the majority of the HBD sequence that were incorporated in the HBB locus were in the region between the nickase cuts. In contrast, a low frequency of gene conversion was observed when the Cas9 N863 nickase was used (FIG. 4A). In the case of Cas9 N863A nickase, a majority of the gene editing events were insertions in which the inserted part was a duplication of the overhangs (FIGS. 6A-6B).

[1257] FIG. 7A shows compiled data of the gene editing events resulting from DNA lesions generated by the three different Cas9 variants. While similar rates of overall modification at the HBB locus were observed, the distribution of the resulting type of repair outcome dramatically differed. 12.4% of WT Cas9-induced modifications harbored the footprint of the highly homologous HBD gene (a phenomenon known as “gene conversion”). In gene conversion, the HBD locus will serve as a template to repair the HBB gene. HBD is a highly similar gene (92% identity with HBB) that does not carry the sickle-cell mutation (FIG. 6B). The HBD gene lies approximately 7.6 kb upstream of the HBB gene on chromosome 11. The rate of gene conversion from the HBD gene was significantly enhanced when lesions were induced using the Cas9 D10A nickase. 32.8% of D10A Cas9-induced modifications were resolved by gene conversion. In contrast, 3.5% of N863A Cas9-induced modifications were resolved by gene conversion. Overall, this data suggested that DNA cleavage induced by the Cas9 D10A nickase are particularly amenable for gene conversion from the endogenous HBD gene. These data also suggest that the different DNA ends generated with different Cas9 variants activate different DNA repair pathway responses.

[1258] FIG. 7B shows the distribution of deletion size resulting from DNA lesions generated by the three different Cas9 variants. Specifically, WT Cas9-induced lesions were predominantly resolved as deletions. Deletions were also frequently observed when using the gRNA pair 8/15 with either the Cas9 D10A nickase or Cas9 N863A nickase. WT Cas9 induced deletions were predominantly small in size (median deletion size=3 nucleotides (nts)). Cas9 D10A nickase-induced deletions and Cas9 N863A nickase-induced deletions were significantly larger in size (median deletion size=28 nts and 36 nts, for Cas9 N863A and Cas9 D10A, respectively).

[1259] To determine whether the DNA repair events observed were representative of events occurring in single cells, and not the result of PCR bias during amplification of the DNA from a population of cells, repair outcomes were analyzed from a single U2Os cell clones (˜80 single clones per condition) after nucleofection with each of the three Cas9 variants. As shown in FIG. 8A, the repair event distribution was very similar in individual clones to the distribution observed in parental population of mixed cells. Similar repair event distribution was observed using the myeloid leukemia cell line K562 (FIG. 8B). These data suggest that the DNA ends generated with the different Cas9 variants activate different DNA repair pathway responses.

[1260] To better understand the molecular pathways responsible for the gene conversion pathway, Cas9 D10A nickase-induced gene conversion tracts were analyzed in detail. The region located between the 8gRNA/15gRNA pair was converted to the HBD sequence in approximately 80% of all gene conversion cases, as detected by analyzing single nucleotide polymorphisms (SNPs) that perfectly matched the HBD sequence (FIG. 9). Directionality in the gene conversion tracts was observed, suggesting that perhaps the homology arm to the right of 8gRNA more frequently engages in homology pairing with the HBD locus due to the presence of longer stretches of uninterrupted homology, resulting in effective gene conversion (FIG. 9). In contrast, the arm to the left of 15gRNA harbors more homology-disrupting SNPs, which we speculated could result in a higher frequency of heteroduplex rejection at the HBD site.

[1261] Gene conversion is a highly precise mechanism that repairs DSBs during the S/G2 phases of the cell cycle through the homologous recombination (HR) pathway. The genetic requirements of HR have been characterized. Briefly, initially 3-5′ resection leads to the exposure of a single stranded 3′ overhang. Subsequently, BRCA2-dependent RAD51 loading onto the single stranded DNA initiates homology search and strand invasion. To determine whether gene conversion proceeds through the HR pathway, BRCA2 and RAD51 were knocked-down using siRNA in U2OS cells, and gene conversion analyzed following Cas9 D10A nickase-induced lesions (FIG. 10A). Gene conversion outcomes were significantly decreased when either BRCA2 or RAD51 were knocked down, indicating that both genes are required for efficient gene conversion and suggesting that gene conversion from the HBD locus proceeds through the HR pathway (FIG. 10B).

[1262] To investigate the fate of the predicted Cas9 N863A nickase-induced 3′ overhang structure, the repair outcome of these lesions was analyzed in detail. While the predominant repair outcome for these lesions was insertions (29.9% of all modifications, as compared to 9.0% for modifications induced by the Cas9 D10A nickase), the majority of the insertions mapped to the overhang (98.5% of insertions), while only 71.4% of insertions induced by the Cas9 D10 nickase mapped to the overhang (FIG. 11A). Cas9 N863A nickase-induced insertions are significantly longer than the insertions induced by Cas9 D10A nickase (FIG. 11B). Cas9 N863A nickase-induced insertions also predominantly stem from the central part of the overhang, which is different from the Cas9 D10A nickase-induced insertions, which mostly derive from the first 20 nts of the overhang structure (FIG. 12A). Moreover, Cas9 N863A nickase-induced insertions more frequently contained several (up to seven) repetitions of the entire 47 nts overhang structure generated upon cleavage, and in all cases of full overhang repetition, microhomology usage was evident (FIG. 11A and 12B). These observations suggest a mechanistic difference between the Cas9 N863A nickase- and Cas9 D10A nickase-induced insertions. To test the effect that different lesions had on the engagement of HDR, a donor template was provided as a single-strand oligo or as ds DNA donor. In both cases the length of the donor is approximately 170 bp with 60 bp of homology outside the nicks and with 8 mismatches (FIG. 13A). As shown in FIG. 13B, the Cas9 D10A nickase that resulted in a 5′ overhang resulted in a significantly higher rate of HDR, especially when using the upper stand as a single-strand oligo donor. FIG. 13C shows different forms of donors (dsDNA, upper stand, and lower strand) and there contribution to HDR.

[1263] To further investigate the different repair outcomes resulting from the use of the different Cas9 variants, gene correction efficiency using a 179 nt ssODN that targets the HBB locus in the area of the sickle mutation was tested. Similar to the outcome observed during gene conversion, Cas9 D10A nickase, which creates a 5′ overhang, yielded the highest rate of gene correction (23.8% for Cas9 D10A nickase, as compared to 7.7% for WT Cas9 (p=0.0024) and 7.5% for Cas9 N863A nickase (p=0.0016)) (FIG. 14). To further dissect the genetic requirements of the ssODN gene correction approach, HR components BRCA2 and RAD51 were knocked down using siRNA, No change in gene correction frequency was observed, indicating that gene correction using a ssODN proceeds through a pathway that is independent of BRCA2 and RAD51 (FIG. 10C).

[1264] Given the differences in repair outcome and repair pathway engagement observed using the different Cas9 variants using a paired nickase strategy, repair outcome and repair pathway engagement resulting from a single nicking strategy was investigated.

[1265] First, the repair outcome in cells treated with the Cas9 D10A nickase with either a single gRNA or two gRNA molecules was analyzed. As shown in FIG. 15, gene conversion was observed with Cas9 D10A nickase with a single gRNA molecule (i.e., 8gRNA or 15 gRNA), as compared to two gRNA molecules (8gRNA/15gRNA pair). With a single gRNA, a reduction in the overall frequency of gene editing events was observed, as compared to the use of a pair of gRNA molecules. However, a similar distribution of the different types of editing events was maintained.

[1266] In additional experiments, the repair outcome and repair pathway engagement was examined in cells treated with the 8gRNA in combination with either the Cas9 D10A nickase, which results in a single DNA nick in the target strand, with the Cas9 N863A nickase, which results in a single DNA nick in the non-target strand, or with the control WT Cas9, which results in a blunt double stranded break. The overall modification frequency observed for WT Cas9-induced lesions was significantly higher than that observed for the Cas9 D10A nickase- and Cas9 N863A nickase-generated single nicks (66.3% for WT Cas9, as compated to 4.6% for Cas9 D10A nickase and 1.3% for Cas9 N863A nickase) (FIG. 16A). This difference suggests the presence of a highly efficient single nick repair mechanism. To determine whether the difference in detectable repair events between Cas9 D10A nickase-induced single nick lesions and Cas9 N863A nickase-induced single nick lesions (approximately 4 fold; 4.6% for Cas9 D10A nickase vs. 1.3% for Cas9 N863A nickase, p=3.1×10⁻⁶) was attributable to differences in cutting efficiency between the two nickase variants, an in vitro DNA cutting assay was performed in which a gel-shifted DNA band indicates successful DNA cleavage. No significant differences in cutting efficiency between the Cas9 D10A nickase or the Cas9 N863A nickase were observed (FIG. 16B), suggesting that either the DNA repair of Cas9 N863A nickase-induced single nick of the non-target strand proceeds more efficiently than the repair of the cleaved target DNA strand, or that Cas9 D10A nickase-induced nick results in a more mutagenic intermediate.

[1267] To determine whether gene correction and gene conversion events that result from single nicking using a Cas9 nickase variant proceed through similar pathways as described above for the paired nickase approach (i.e., utilizing a gRNA pair and Cas9 nickase), BRCA2 and RAD51 were knocked-down using siRNA in U2OS cells, and repair outcomes analyzed. Gene conversion was dependent on RAD51 for WT Cas9-, Cas9 D10A nickase-, and Cas9 N863A nickase-induced single nicks (FIG. 17A and 18A). An approximately 6-fold increase in gene correction was observed upon RAD51 knockdown for Cas9 D10A nickase-induced single nicks (from 1.0% in FF control to 6.24% in siRAD51-treated cells). However, an increase in gene correction was not observed upon RAD51 knockdown for Cas9 N863A nickase-induced single nicks (FIG. 17A and 18A). Similar results were obtained with BRCA2 depletion (FIG. 17A). An equivalent simultaneous increase in overall modifications for Cas9 D10A nickase-induced nicks was also observed upon RAD51 knockdown (from 6.1% with the FF control to 48.4% in siRAD51-treated cells), without a relative increase in gene correction efficiency (FIG. 17A and 18A). A significant increase in the size of deletions resulting from Cas9 D10A nickase-induced single nicks was also observed upon RAD51 knockdown (FIG. 18B). Overall, these observations suggest that Cas9 D10A nickase-induced nicks are converted to double stranded breaks during S-phase and are then repaired by more error prone pathways than HR. It is possible that Cas9 D10A nickase-induced lesions might not be sensed until S-phase, when they are converted to DSBs (see, e.g., Mayle 2015; Saleh-Gohari 2005; Neelsen and Lopes 2015). This may be due to the inability of RAD51- and BRCA2-deficient cells to undergo replication fork remodeling to prevent replication fork run-off or undesirable processing at the Cas9 D10A nickase-induced nick (FIG. 18C, left panel) (see, e.g., Neelsen and Lopes 2015; Schlacher 2011; Zellweger 2015). Alternatively, the high degree of locus disruption could be due to the inability of RAD51/BRCA2 deficient cells to complete HR if run-off has occurred (FIG. 18C, right panel). The observed increase in the size of the deletions in the absence of RAD51 could suggest the involvement of A-NHEJ pathways in the repair of Cas9 D10A nickase-induced nicks during S-phase. These data cumulatively provide evidence that both RAD51 and BRCA2 are critical in promoting high fidelity repair of nicks that escape the SSBR pathway.

[1268] In summary, Cas9 nickases (D10A and N863A) showed comparable levels of efficacy compared to wild type Cas9. Different DNA ends engage different repair pathways. The use of a wild type Cas9 generates a blunt end, which are preferentially repaired by canonical NHEJ. Use of a Cas9 nickase with two gRNAs generates either 3′ or 5′ overhangs, which are not suitable substrates to be repaired by canonical NHEJ but can be repaired by alternative pathways.

[1269] The 5′ protruding end was mostly repaired through a mechanism called gene conversion in which the HBB gene is repaired by using the HBD locus as a template. Use of nickase is advantageous to promote HDR. In the experiments in which a donor was provided, a significantly higher rate of HDR was observed using the Cas9 D10A nickase as compared to the wild type Cas9. Also, a significantly higher rate of gene correction was observed using the Cas9 D10A nickase as compared to the wild type Cas9 or the Cas9 N863A nickase. The nature of the donor template influences the outcome as HDR was preferentially observed when a single stranded (SS) oligo was used.

[1270] Methods

[1271] gRNA selection and production—A list of gRNAs directing S. pyogenes Cas9 were designed to target the human hemoglobin beta (HBB) locus requiring a NGG PAM (protospacer adjacent motif). Potential gRNAs were aligned against the human genome sequence to identify potential off-target sites. Variations in PAM sequence (NGG or NAG) were allowed for gRNAs with spacer lengths of 20 nucleotides. Primers containing gRNA sequences were synthesized (Integrated DNA Technologies (IDT)). gRNAs 8 and 15 were generated by cloning annealed gRNA sequence oligos containing the target sequence into pMLM3636 (Addgene plasmid #43860) which contains a S. pyogenes Cas9-TRACR and a customizable U6-driven gRNA scaffold. Plasmid DNA was purified using MaxiPrep Kit (ThermoFisher) and sequences were confirmed by Sanger sequencing.

[1272] Cell lines and cell culture—HEK293 (ATCC #CRL-1573), K562 (ATCC #CCL-243) and U2-OS (ATCC #HTB-96) cells were maintained in Dulbecco's Modified Eagle Medium (DMEM; Life Technologies) supplemented with 10% fetal bovine serum (FBS) and 5% penicillin/streptomycin, and 2 mM Glutamax. Cells were kept at 37° C. in a 5% CO₂ incubator.

[1273] Transfections/Electroporations—2.5×10⁵ cells were transfected using the Lonza 4D Nucleofector (AAF-1002B 4D-Nucleofector™ Core unit, AAF-1002X 4D-Nucleofector™ X unit, SE Cell Line 4D-Nucleofector X Kit S V4XC-1032) with 200 ng of gRNA plasmid and 750 ng of Cas9-variant encoding plasmid (pJDS246-WT; Cas9/pAF001-N863A; Cas9/pJDS271-D10ACas9) in the presence or absence of 50 pmol single-stranded deoxynucleotide donor (ssODN) using the DN-100 program. After nucelofection, cells were incubated at room temperature for 10 min. and then resuspended in complete DMEM before transfer to 6-well plates containing pre-warmed media. Media was changed 72 hours after nucleofection, and cells were harvested 5 days post nucleofection

[1274] siRNA Knockdowns—To knock down BRCA2 and RAD51, immediately before nucleofection with Cas9-variant encoding plasmid and gRNA(s), cells were treated with 30 pmols of siBRCA2 (siGENOME Human BRCA2 (675) siRNA—SMARTpool; M-003462-01-0005), 15 pmols of both siRAD51 (siGENOME Human RAD51 (5888) siRNA; D-003530-05-0005), or 15 pmols of control firefly luciferase siRNA (“FF”) (FF siRNA; CTM-127256). Samples were collected for gDNA extraction and further processing 5 days after nucleofection and knockdown efficiency assessed by Western Blot.

[1275] Genomic DNA Analysis—Genomic DNA was extracted from cells (Beckman Coulter Agencourt DNAdvance #A48706) according to the manufacturer's directions. The targeted genomic region of HBB was amplified by PCR in a 50 μl reaction mixture (10 μL of 5× Phusion HF buffer; 0.5 μM forward primer (F1_HBB, 5′-AGGCCATCACTAAAGGCACC (SEQ ID NO: 16313)); 0.5 μM reverse primer (R_HBB, 5′-TAAGCCAGTGCCAGAAGAGC (SEQ ID NO:16314)); 200 μM dNTP; 1.5 μL DMSO; 0.5 μl of Phusion polymerase; 100 ng of gDNA template) using the following PCR conditions: 30 s at 98° C. for initial denaturation, followed by 30 cycles of 10 seconds (s) at 98° C. for denaturation, 15s at 64° C. for annealing, 30s at 72° C. for extension, and 5 minutes at 72° C. for the final extension. PCR products were purified using (1.8×) Agencourt AMPure XP beads (Beckman Coulter Agencourt AMPure XP-PCR Purification #A63882) as directed by the manufacturer. Amplified locus fragments were cloned into pCR4-TOPO vectors using the ZeroBlunt TOPO Cloning Kit (Life Technologies Cat. No. #K287540) and transformed in One Shot Top10 chemically competent E. coli cells. Cells were plated on carbenicillin LB agar plates and incubated overnight at 37° C. Plasmid DNA from 96 colonies per sample was sequenced at Macrogen Corp. and Genewiz, Inc. using an M13 forward or reverse primer.

[1276] Single cell cloning—2.5×10⁵ U2OS cells per condition were nucleofected using Lonza 4D Nucleofector (AAF-1002B 4D-Nucleofector™ Core unit, AAF-1002X 4D-Nucleofector™ X unit). The cells were plated in 6 well dishes. For each of the conditions, 0.3 cells/well were plated in 3X 96 well plates. After 3 weeks, the 96 well plates were visually scored using microscopy for single colony formations. More than 80 clones were picked for each condition and analyzed by TOPO cloning the PCR products of the amplified locus. Competent cells were plated onto divided bioassay plates with LB agar containing ampicillin (Molecular Devices Vented QTray, Fischer Scientific Cat. No. #NC0183882) and 6 colonies were picked for each subclone. Genomic DNA was extracted from cells using DNAdvance kits (Beckman Coulter Agencourt DNAdvance—Nucleic Acid Isolation from Mammalian Tissue #A48706). The HBB locus of the genomic DNA from individual clones was analyzed as described above. 6 colonies were analyzed for each subclone.

[1277] Illumina Next Generation Sequencing—Two rounds of PCR were performed on gDNA. The first round of amplification was used to amplify the HBB locus. Amplification was performed in a 50 μl reaction volume, (10 μL of 5× HercII buffer; 0.5 μM forward primer (HBB Miseq 1F: 5′ CCATCTCATCCCTGCGTGTCTCCGACCACCAGCAGCCTAAGG (SEQ ID NO:16315)); 0.5 μM reverse primer (HBB Miseq 1R: 5′ CCTCTCTATGGGCAGTCGGTGATGGCCATCTATTGCTTACATTTGCT (SEQ ID NO:16316)); 50 μM dNTP; 50 mM MgCl₂; 0.5 μl of HercII polymerase; 250 ng of gDNA template) using the following conditions: 2 min. at 95° C. for initial denaturation, followed by 30 cycles of 20 s at 95° C. for denaturation, 20 s at 60° C. for annealing, 20 s at 72° C. for extension, and 3 min. at 72° C. for the final extension. A second round of PCR amplification was performed to incorporate the P7 and P5 Illumina adapters and a unique 8-mer barcode sequence in a 50 μl reaction mixture (10 μL of 5× HercII buffer; 0.5 μM forward primer; 0.5 μM reverse primer; 50 uM dNTP; 0.5 ul of HercII polymerase; 3ul of round 1 PCR product) using the amplification conditions as the first round of PC R amplification. PCR products were purified using (1.8×) Agencourt AMPure XP beads, as directed by the manufacturer, eluted in 40 μl of H₂O, and size verified by capillary electrophoresis using the Qiagen QIAxcel Advanced System. PCR products were quantified using Picogreen, normalized into one library pool and sequenced on the Illumina MiSeq according to the manufacturer's protocols.

[1278] Quantification of editing events in NGS data—The CRISPResso software (v0.9.1)(see, e.g., Pinello et al.) was used to identify editing events in high-throughput sequencing data and determine the frequencies of insertion, deletion, gene conversion and gene correction events. To identify insertions and deletions events, CRISPResso default settings were used to obtain the number of reads with either insertions or deletions. To identify gene conversion and gene correction events, CRISPResso was used separately for each sample and potential HDR template (i.e., the orthologous HBD sequence and the ssODN) with a required sequence similarity of 95% (using the hdr_perfect_alignment_threshold parameter).

[1279] Determination of insertion sizes—To identify insertions from Sanger sequencing data, the Needleman-Wunsch algorithm implementation in the Biopython (pairwise2.globalms) package was used with the following parameters: base match score=2, base mismatch penalty=−1, gap open penalty=−50, gap extend penalty=−1. Insertion sequences were identified by taking the contiguous bases aligned to gap characters in the reference sequence.

[1280] Overhang analysis—Overhang sequence was identified as located between the two predicted cleavage sites for guide RNA pairs, under the assumption that cleavage occurs three nucleotides 5′ of the start of the NGG PAM. For the gRNA 8/15 pair, the predicted overhang sequence is:

(SEQ ID NO: 16317)
TCATCCACGTTCACCTTGCCCCACAGGGCAGTAACGGCAGACTTCTC.

Insertion sequences were classified according to the absence of matching overhang sequence, the presence of a partial matching sequence (at least one 9-mer in common), or a the presence off a full matching sequence (complete overhang sequence contained within the insertion sequence). Fisher's exact test was used to determine statistical significance of differences in the proportion of sequences with partial or full overhang matches generated with Cas9 D10A nickase or Cas9 N863A nickase. Segments of the overhang sequence overrepresented in insertions were identified by extracting all 4-mer sequences present in each insertion sequence and identifying the positions in the overhang where the 4-mer sequence exactly matched. 4-mers found multiple times within the overhang sequence were excluded from downstream analyses. Statistical significance of the distribution of 4-mer positions resulting from Cas9 D10A nickase- or Cas9 N863A nickase-induced lesions was tested using a permutation test (permTS function from the “perm” R package with default settings).

### Example 5: Assessment of Gene Targeting in Hematopoietic Stem Cells

[1281] Transplantation of autologous CD34⁺ hematopoietic stem cells (HSCs, also known as hematopoietic stem/progenitor cells or HSPCs) genetically modified to correct the Sickle Cell Disease (SCD) mutation in the human β-hemoglobin gene (HBB) would prevent deformability (sickling) after deoxygenation in the erythrocyte progeny of corrected HSCs which could ameliorate symptoms associated with SCD. Genome editing with the CRISPR/Cas9 platform precisely alters endogenous gene targets by creating an indel at the targeted cut site that can lead to knock down of gene expression at the edited locus. In this Example, genome editing in the human K562 bone marrow erythroleukemia cell line, which serve as a proxy for HSCs and which can be predictive of genome editing in HSCs, were electroporated with Cas9 mRNA and gRNA HBB-8 and gRNA HBB-15 to induce gene editing at the human HBB locus.

[1282] K562 cells were grown in RPMI media (Life Technologies) containing 10% fetal bovine serum (FBS). S. pyogenes Cas9 mRNA and gRNA HBB-15 and gRNA HBB-8 were prepared by in vitro transcription using linearized plasmid DNA as templates and the Ambion mMessage mMachine® T7 Ultra Transcription kit (Life Technologies) according to the manufacturer's instructions. In this embodiment, both the Cas9 and gRNA were in vitro transcribed using a T7 polymerase. For example, a 5′ ARCA cap was added to both RNA species simultaneous to transcription while a polyA tail was added after transcription to the 3′ end of the RNA species by an E. coli polyA polymerase. Capped and tailed gRNA HBB-8 and gRNA HBB-15 were complexed at room temperature with S. pyogenes H-NLS-Cas9 protein at a molar ratio of ˜25:1 (gRNA:Cas9 protein) in a total of 30 μg RNP. Briefly, three million K562 cells were suspended in 100 μL electroporation buffer and transferred to the RNP solution (13 μL). In addition, K562 cells were electroporated with S. pyogenes Cas9 mRNA and each of the gRNA HBB-8 and gRNA HBB-15. For the mRNA/gRNA electroporation, 10 μg of gRNA HBB-8 (or 10 μg of HBB gRNA HBB-15) were mixed with 10 μg of Cas9 mRNA. Four million K562 cells were suspended in 100 μL electroporation buffer and then transferred to the mRNA/gRNA solution (13 μL). K562 cells mixed with either RNP or RNA were electroporated. At 48 hours after electroporation, K562 cells were enumerated by trypan blue exclusion and were determined to have >88% viability in the electroporated cell populations. Genomic DNA was extracted from K562 cells 48 hours after electroporation and HBB locus-specific PCR reactions were performed.

[1283] In order to detect indels at the HBB locus, T7E1 assays were performed on HBB locus-specific PCR products that were amplified from genomic DNA samples from electroporated K562 cells and the percentage of indels detected at the HBB locus was calculated (FIG. 19).

[1284] Co-delivery of 10 μg RNP which contains wild-type S. pyogenes Cas9 protein with HBB gRNA 8 or HBB gRNA 15 resulted in 26.8% and 16.1% indels, respectively, at the HBB locus in gDNA from K562 cells (molar ratio protein:gRNA 24:1). Co-delivery of Cas9 mRNA with gRNA HBB-8 or HBB-15 led to 66.9% and 29.5% indels at the HBB locus in gDNA from K562 cells (10 μg of each RNA/4 million cells). This example shows that delivery of Cas9 mRNA/gRNA and Cas9 RNPs leads to editing of the HBB locus in a relevant bone marrow derived hematopoietic cell line (K562 cells). Clinically, transplantation of autologous HSCs in which the HBB locus has been edited to correct the genetic mutation that causes red blood cell sickling could be used to ameliorate symptoms of SCD.

### Example 6: Contribution of Different Pairs of gRNA Molecules for Gene Correction

[1285] The CRISPR/Cas9 system was used to target the human HBB gene in the region of the sickle cell anemia-causing mutation.

[1286] Three different gRNA pairs were evaluated to examine how different pairs of gRNA molecules allocated at different distances can affect the frequency of different DNA repair outcomes in the presence of dual-nicks, in which the nicks are placed on opposite strands and leave either 3′ or 5′ overhangs of varying lengths. DNA repair outcomes including, e.g., indel mutations resulting from non-homologous end-joining (NHEJ), homology-dependent repair (HDR) using a donor as a template, and HDR using the closely related HBD gene as an endogenous template, were characterized. The frequencies of these various repair outcomes under different conditions offer insights into the mechanism of DNA repair and how it is impacted by the nature of the DNA break, the length of the overhangs, and/or the nature of the sequence exposed.

[1287] In this study different gRNA molecules for the HBB region that surround the nucleotides encoding the amino acid that is most commonly mutated in sickle cell disease were tested in 293T cells with wild type Cas9. The gRNA molecules that induced similar high rates of NHEJ and had PAMs facing in opposite orientations were selected to test as pairs with Cas9 D10A and Cas9 N863A nickases.

[1288] As shown in FIG. 20, the gRNA pairs 8/15 (“8gRNA”/“15gRNA” pair), 8/19 (“8gRNA”/“19gRNA” pair) and 8/21 (“8gRNA”/“21gRNA” pair) were selected. (“8gRNA”/“15gRNA” pair). The targeting domain sequences for “8gRNA” and “15gRNA” are described above. “19gRNA” has the targeting domain sequence of CCUGUGGGGCAAGGUGAACG (SEQ ID NO: 419) and “21gRNA” has the targeting domain sequence of UGAAGUUGGUGGUGAGGCCC (SEQ ID NO: 431). These pairs of gRNA molecules used in combination with the mutant Cas9 D10A generated a 5′ overhang of 47 bp, 37 bp and 61 bp, respectively; in combination with the mutant Cas9 N863A generated a 3′ overhang of 47 bp, 37 bp and 61 bp, respectively.

[1289] In this Example, U2OS cells were electroporated with 200 ng of each gRNA and 750 ng of plasmid that encodes mutant Cas9 (D10A or N863A). Cells were collected 6 days after electroporation and genomic DNA was extracted. PCR amplification of the HBB locus was performed and the product was subcloned into a Topo Blunt Vector. For each condition in each experiment, 96 colonies were sequenced with Sanger sequencing. In the experiments assessing HDR efficacy, cells were electroporated with 2.5 μg of single stranded oligo or double stranded oligo in addition to the gRNA and the Cas9-encoding plasmid.

[1290] As shown in FIG. 21, the total percentages of all editing events detected by Sanger sequencing of the HBB locus were similar using the different pairs of gRNA molecules (Cas9 N863A was less active compared to Cas9 D10A). FIG. 21 indicates that the overall editing frequencies for both Cas9 D10A and Cas9 N863A nickases were independent of overhang length and composition.

[1291] FIG. 22 shows that for the Cas9 N863A nickase, a majority of the gene editing events were insertions with all three pairs of gRNA molecules (Cas9 N863A had a higher level of insertions compared to Cas9 D10A). FIG. 22 indicates that the Cas9 N863 nickase yielded a higher frequency of insertions, which was independent of overhang length and composition, while the Cas9 D10A insertions were overall less frequent, they appeared to be sensitive to overhang length and composition.

[1292] As shown in FIG. 23, the Cas9 N863A-induced insertions are mostly duplications of the overhang regions, as opposed to the overhangs coming from the Cas9 D10A, i.e., with specific gRNA pair combinations, the Cas9 N863 nickase had a higher percentage of insertions derived from the overhang sequence than the Cas9 D10A nickase. Moreover, the lengths of the insertions between Cas9 D10A and Cas9 N863A were substantially different with longer insertions being observed using the Cas9 N863A nickase (FIG. 24).

[1293] As shown in FIG. 25, in the case of the Cas9 D10A nickase, which leaves a 5′ protruding end, the lesion was mostly repaired through a mechanism of gene conversion with a significantly higher rate compared to the Cas9 N863A nickase. Not all gRNA pairs tested in this example behaved similarly. The 8/15 gRNA pair was mostly repaired using a gene conversion mechanism, while the 8/19 and 8/21 pairs yielded a significant reduction of gene conversion frequency. Specifically, the 8/21 pair displayed a 3 fold reduction in gene conversion efficiency. These data suggest that either the length of the overhang or the nature of the sequence exposed, or both, could affect the DNA repair machinery. These data indicate that gene conversion was depending on the type of Cas nickase and on the sequence and length of overhangs.

[1294] To test the effect that different pairs had on the engagement of HDR, a donor template was provided as a single-strand oligo or as a double stranded (ds) DNA donor. In both cases the length of the donor is approximately 170 bp with 60 bp of homology outside the nicks and with 8 mismatches (FIG. 26). As shown in FIG. 26, all three pairs resulted in similar HDR frequencies, i.e., the frequency of gene correction from exogenous donor was comparable despite of the length of overhangs. Neither Cas9 D10A nor Cas9 N863A induced gene correction from exogenous donor was dependent on overhang length and composition. FIG. 26 indicates that gene correction from exogenous donor was more efficient with the Cas9 D10A nuclease compared to the Cas9 N863A nuclease.

### Example 7: Contact Between S. pyogenes Cas9 Ribonucleoprotein Complexed to gRNAs Targeting the HBB Genetic Locus Supports Gene Editing in Adult Human Hematopoietic Stem Cells

[1295] Transplantation of autologous CD34⁺ hematopoietic stem cells (HSCs) collected from patients affected with hemoglobinopathies (e.g., sickle cell disease [SCD], β-thalessemia), that have been genetically modified with a lentivirus vector that expresses non-sickling β-hemoglobin gene (HBB) has been shown to restore expression of functional adult hemoglobin (HbA) thus preventing the formation of sickle hemoglobin (HbSS), in erythroid cells derived from transduced CD34⁺ cells and ameliorating clinical symptoms in affected patients (Press Release from Bluebird Bio, Jun. 13, 2015, “bluebird bio Reports New Beta-thalassemia major and Severe Sickle Cell Disease Data from HGB-205 study at EHA”). However, delivery of a transgene encoding a non-sickling β-hemoglobin does not correct the causative mutation or prevent expression of the mutant (e.g., sickling) form of HBB. Furthermore, lentivirus vector transduction of CD34⁺ cells can lead to the occurrence of multiple transgene integration sites per cell, and the long-term effects of multiple transgene integration sites is currently undetermined.

[1296] In contrast, genome editing with the CRISPR/Cas9 platform precisely alters endogenous gene targets by creating an insertion or deletion (indel) at the cut site that can lead to gene disruption at the edited locus. Co-delivery of two gRNAs each targeting regions proximal to the single nucleotide polymorphism (SNP) that encodes HbSS (e.g., GAG→GTG, which results in a change in the amino acid residue from glutamic acid to valine) co-delivered with a Cas9 D10A nickase supports a low level of homology directed repair (HDR) in human cell lines (e.g., gene conversion using a region of homology in the HBD locus as DNA repair template).

[1297] In this Example, genome editing in adult human mobilized peripheral blood CD34⁺ HSCs after co-delivery of Cas9 D10A nickase with two gRNAs targeting the HBB locus was evaluated. The edited CD34⁺ cells were then differentiated into myeloid and erythroid cells to determine the hematopoietic activity of the HSCs. Gene editing at the HBB locus was evaluated by T7E1 analysis and DNA sequencing. Expression of HBB protein was also analyzed in erythroid progeny.

[1298] Human CD34⁺ HSCs cells from mobilized peripheral blood (AllCells®) were thawed into StemSpan Serum-Free Expansion Medium (SFEM™, StemCell Technologies) containing 300 ng/mL each of human stem cell factor (SCF) and flt-3 ligand (FL), 100 ng/mL thrombopoietin (TPO), and 60 ng/mL of IL-6, and 10 μM PGE2 (Cayman Biochemicals; all other supplements were from PeproTech® unless otherwise indicated). Cells were grown for 3 days in a humidified incubator and 5% CO₂ 20% O₂. On day 3 (morning), media was replaced with fresh Stemspan-SFEM™ supplemented with human SCF, TPO, FL and PGE2. In the afternoon of day 3, 2.5 million CD34⁺ cells per sample were suspended in electroporation buffer.

[1299] The gRNA was generated by in vitro transcription using a T7 polymerase. A 5′ ARCA cap was added to the RNA simultaneous to transcription while a polyA tail was added after transcription to the 3′ end of the RNA species by an E. coli polyA polymerase.

[1300] After the gRNAs were in vitro transcribed and tailed, the quality and quantity of gRNAs were evaluated with the Bioanalyzer (Nanochip®) to determine RNA concentration and by Differential Scanning Fluorimetry (DSF) assay, a thermal shift assay that quantifies the change in the thermal denaturation temperature of Cas9 protein with and without complexing to gRNA. In DSF assays, the Cas9 protein was mixed with gRNA and allowed to form complexes for 10 minutes. Cas9 protein:gRNA were mixed at a molar ration of 1:1, and the DSF assay performed as a measure of Cas9 stability and as an indirect measure of gRNA quality, since a 1:1 ratio of gRNA:Cas9 should support a thermal shift if the gRNA is of good quality (FIG. 27A).

[1301] For half of the samples, in vitro transcribed capped and tailed guide (g)RNAs HBB-8 and HBB-15 were added at a 2:1 molar ratio to 12.5 μg D10A Cas9 ribonucleoprotein (RNP) (5 μg RNP per million cells) to 2.5 million cells. “HBB-8” has the targeting domain sequence of GUAACGGCAGACUUCUCCUC (SEQ ID NO:388), and “HBB-15” has the targeting domain sequence of AAGGUGAACGUGGAUGAAGU (SEQ ID NO:387). D10A protein and gRNAs RNP complexes were transferred to 2.5 million adult CD34⁺ cells in electroporation buffer. The RNP/cell mixture was transferred to an electroporation cartridge, and the cells then electroporated (“Program 2” and “Program 3”).

[1302] For the second portion of CD34⁺ cell samples, equal amounts (5 μg or 10 μg [2×gRNA] each) of in vitro transcribed capped and tailed guide (g)RNAs HBB-8 and HBB-15 were added to 10 μg of in vitro transcribed Cas9 D10A mRNA. The mRNA:gRNA:cell mixture was transferred to an electroporation cartridge and electroporated using Program 2 (P2). For all samples, the cells were collected from the cartridge and placed at 37° C. for 20 minutes (recovery period). Then, the cells were either transferred to pre-warmed cytokine supplemented Stemspan-SFEM™ media and placed at 30° C. for 2 hours (cold shock samples) or placed directly into 37° C. For the cold shocked samples, the cells were transferred to the 37° C. incubator after the 2-hour incubation period at 30° C. At 24, 48, and 72 hours after electroporation, the CD34⁺ cells were counted by trypan blue exclusion (cell survival) and divided into 3 portions for the following analyses: a) flow cytometry analysis for assessment of viability by co-staining with 7-Aminoactinomycin-D (7-AAD) and allophycocyanin (APC)-conjugated Annexin-V antibody (eBioscience); b) flow cytometry analysis for maintenance of HSC phenotype (after co-staining with phycoerythrin (PE)-conjugated anti-human CD34 antibody (BD Biosciences) and APC-conjugated CD133 (Miltenyi Biotech; c) hematopoietic colony forming cell (CFC) analysis by plating 800 cells in semi-solid methylcellulose based Methocult medium (StemCell Technologies H4435) that supports differentiation of erythroid and myeloid blood cell colonies from HSCs and serves as a surrogate assay to evaluate HSC multipotency and differentiation potential ex vivo; d) genomic DNA analysis for detection of editing at the HBB locus. Genomic DNA was extracted from the HSCs at 48 and 72 hours after electroporation and HBB locus-specific PCR reactions were performed. The purified PCR products were analyzed for insertions/deletions (indels) in T7E1 assays and by DNA sequencing of individual clones (PCR product was transformed and sub-cloned into TOPO-vector, individual colonies picked, and plasmid DNA containing individual PCR products were sequenced).

[1303] Western blot analysis of cell lysates extracted from the Cas9/gRNA electroporated CD34₊ cells indicated the presence of Cas9 protein at 72 hours after electroporation of CD34⁺ cells that received Cas9 RNP and gRNA pair. Very low levels of Cas9 protein were detected in the lysates of cells that were electroporated with Cas9 mRNA (FIG. 27B).

[1304] Electroporated CD34⁺ cells maintained a stem cell phenotype (e.g., co-expression of CD34 and CD133) and viability (e.g., 75% AnnexinV⁻7 AAD⁻) as determined by flow cytometry analysis (FIG. 28A). The absolute number of viable CD34⁺ cells was maintained across most samples over a 72-hour culture period after electroporation (FIG. 28B). In addition, gene edited CD34⁺ cells maintained ex vivo hematopoietic activity and multipotency as indicated by their ability to give rise to erythroid (e.g., CFU-E or CFU-GEMM) and myeloid (e.g., CFU-G, -M or -GM) (FIG. 28C).

[1305] Gene editing at the HBB locus was then evaluated at 72 hours after electroporation of D10A mRNA or RNP co-delivered with two gRNAs (HBB-8 and HBB-15). Briefly, genomic (g)DNA was isolated from electroporated CD34⁺ cells at 72 hours after electroporation, and PCR amplification of a ˜607 bp fragment of the HBB locus (which captured both of the individual genomic locations that were targeted by the two gRNAs HBB-8 and HBB-15) was performed. After cleanup of the HBB PCR product with AMPURE beads, insertions/deletions (indels) at the targeted genomic location were evaluated by T7E1 assay and by DNA sequencing. For the CD34⁺ cells electroporated with D10A mRNA and HBB targeting gRNA pair, no indels were detected (Table 10). In contrast to the negative results obtained after delivery of D10A mRNA, ˜30-60% indels were detected by T7E1 and sequencing analysis of CD34⁺ cells that were electroporated with D10A RNP with the HBB targeting gRNA pair (Table 10, FIG. 29A-29C). The cells that were cultured for 2 hours at 30° C. (after a 20-minute recovery period at 37° C.) exhibited 57% editing as determined by DNA sequencing. In addition, gene conversion (e.g., HBD genomic sequence used as a template copy for DNA repair of the disrupted HBB locus) was detected in the gDNA from CD34⁺ cells that were ‘cold shocked’ (30° C. incubation) at a frequency of 3% relative to the total gene editing events (FIG. 29C).

TABLE 10
Summary of gene editing results in adult CD34⁺ cells 72 hours
after co-delivery of D10A Cas9 and HBB specific gRNA pair.

| | | μg | μg | | | |
|---|---|---|---|---|---|---|
| | | HBB- | HBB- | Temperature | | |
| D10A | μg | 8 | 15 | of 2-hour | % indels | % indels |
| source | D10A | gRNA | gRNA | recovery | (T7E1) | (sequencing) |
| mRNA | 10 | 5 | 5 | 37° C. | 0 | ND |
| mRNA | 10 | 5 | 5 | 30° C. | 0 | ND |
| mRNA | 10 | 10 | 10 | 37° C. | 0 | ND |
| RNP | 12.5 | 3.3 | 3.3 | 37° C. | 45 | 30 |
| RNP | 12.5 | 3.3 | 3.3 | 30° C. | 39 | 57 |
| RNP* | 12.5 | 3.3 | 3.3 | 37° C. | 39 | 39 |

*Alternate electroporation program (P3).

[1306] To determine whether targeted disruption of the HBB locus induced changes in expression of b-hemoglobin protein, CFU-E colonies were picked, dissociated, fixed, permeabilized and stained with PE-conjugated mouse anti-human β-hemoglobin antibody (Santa Cruz Biotechnology®). The erythroid progeny of HBB gene edited cells exhibited a 7-to-10 fold reduction in β-hemoglobin expression compared to the CFU-Es differentiated from untreated control CD34⁺ cells (FIG. 30). These data show that the progeny of gene edited cells retain erythroid differentiation potential and that gene editing events detected in the parental CD34⁺ cells result in reduced protein expression in erythroid progeny.

### Example 8: Contact Between S. pyogenes D10A Cas9 Nickase Ribonucleoprotein Complexed to gRNAs Targeting the HBB Genetic Locus Supports Gene Editing in Fresh Umbilical Cord Blood Derived Human CD34⁺ Hematopoietic Stem Cells

[1307] In this Example, genome editing in freshly collected umbilical cord blood (CB) CD34⁺ HSCs after co-delivery of D10A Cas9 nickase with two gRNAs targeting the HBB locus was evaluated. The edited CB CD34⁺ cells were then differentiated into myeloid and erythroid cells to determine the hematopoietic activity of the HSCs. Targeted disruption of the HBB locus was evaluated by T7E1 analysis and DNA sequencing.

[1308] Human CD34⁺ HSCs cells were isolated from freshly obtained human umbilical cord blood by ficoll gradient density centrifugation followed by MACS® (antibody conjugated immunomagnetic bead sorting) with mouse anti-human CD34⁺ immunomagnetic beads using the human CD34 cell enrichment kit and LS magnetic columns from Miltenyi Biotech. The cells were plated into StemSpan Serum-Free Expansion Medium (SFEM™, StemCell Technologies) containing 100 ng/mL each of human stem cell factor (SCF) and flt-3 ligand (FL), 20 ng/mL each of thrombopoietin (TPO) and IL-6, and 10 μM PGE2 (Cayman Biochemicals; all other supplements were from Peprotech unless otherwise indicated). Cells were grown for 3 days in a humidified incubator and 5% CO₂ 20% O₂. On day 3 (morning), media was replaced with fresh Stemspan-SFEM™ supplemented with human SCF, TPO, FL and PGE2. In the afternoon of day 3, 2.5 million CD34⁺ cells per sample were suspended in electroporation buffer. The gRNAs were generated by in vitro transcription using a T7 polymerase. A 5′ ARCA cap was added to the RNA simultaneous to transcription while a polyA tail was added after transcription to the 3′ end of the RNA species by an E. coli polyA polymerase. After the gRNAs were in vitro transcribed and tailed, the quality and quantity of gRNAs were evaluated with the Bioanalyzer (Nanochip) to determine RNA concentration and by DSF assay performed as a measure of D10A Cas9 nickase RNP stability and as an indirect measure of gRNA quality.

[1309] In vitro transcribed capped and tailed guide gRNAs HBB-8 and HBB-15 were added at a 2:1 molar ratio (total gRNA:Cas9 protein) to 12.5 μg D10A nickase ribonucleoprotein (RNP) (5 μg RNP per million cells) to each of two samples each containing 2.5 million CB CD34⁺ cells. A third CB CD34⁺ cell aliquot was mixed with 25 μg D10A nickase RNP and HBB gRNAs (total gRNA:D10A ratio at 2:1). For each experimental sample, the D10A RNP/cell mixture was transferred to an electroporation cartridge, and the cells then electroporated using Program 2.

[1310] For all samples, the cells were collected from the cartridge and placed at 37° C. for 20 minutes (recovery period). For the CB CD34⁺ HSCs that were contacted with 12.5 μg D10A nickase RNP, one sample was transferred to pre-warmed cytokine supplemented Stemspan-SFEM™ media and placed at 30° C. for 2 hours (cold shock samples) or placed directly into the same media at 37° C. For the cold shocked samples, the cells were transferred to the 37° C. incubator after the 2-hour incubation period at 30° C. At 24, 48, and 72 hours after electroporation, the CB CD34⁺ HSCs were counted by trypan blue exclusion (cell survival) and divided into 3 portions for the following analyses: a) flow cytometry analysis for assessment of viability by co-staining with 7-Aminoactinomycin-D (7-AAD) and allophycocyanin (APC)-conjugated Annexin-V antibody (eBioscience); b) flow cytometry analysis for maintenance of HSC phenotype (after co-staining with phycoerythrin (PE)-conjugated anti-human CD34 antibody (BD Biosciences) and APC-conjugated CD133 (Miltenyi Biotech; c) hematopoietic colony forming cell (CFC) analysis by plating 800 CB CD34⁺ HSCs in semi-solid methylcellulose based Methocult medium (StemCell Technologies H4435) that supports differentiation of erythroid and myeloid blood cell colonies from HSCs and serves as a surrogate assay to evaluate HSC multipotency and differentiation potential ex vivo; d) genomic DNA analysis for detection of editing at the HBB locus. Genomic DNA was extracted from the HSCs at 48 and 72 hours after electroporation and HBB locus-specific PCR reactions were performed. The purified PCR products were analyzed for insertions/deletions (indels) in T7E1 assays and by DNA sequencing of individual clones (PCR product was transformed and subcloned into TOPO-vector, individual colonies picked, and plasmid DNA containing individual PCR products were sequenced).

[1311] Electroporated CB CD34⁺ cells maintained a stem cell phenotype (e.g., co-expression of CD34 and CD133, ˜90% CD34±CD133±) and viability (e.g., 91% AnnexinV⁻7 AAD⁻) as determined by flow cytometry analysis (FIG. 31A). The absolute number of viable CD34⁺ cells was maintained across most samples over a 72-hour culture period after electroporation. In addition, gene edited CD34⁺ cells maintained ex vivo hematopoietic activity and multipotency as indicated by their ability to give rise to erythroid (e.g., CFU-E or CFU-GEMM) and myeloid (e.g., CFU-G, -M, or -GM) (FIG. 31B).

[1312] Gene editing at the HBB locus was then evaluated at 72 hours after electroporation of D10A nickase RNP co-delivered with 2 gRNAs (HBB-8 and HBB-15). Briefly, gDNA was isolated from electroporated CD34⁺ cells at 72 hours after electroporation, and PCR amplification of a ˜607 bp fragment of the HBB locus (which captures both of the individual genomic locations that were targeted by gRNAs HBB-8 and HBB-15) was performed. After cleanup of the HBB PCR product with AMPURE beads, insertions/deletions (indels) at the targeted genomic location were evaluated by T7E1 assay and by DNA sequencing. For the CD34⁺ cells electroporated with 5 μg per million cells of D10A nickase RNP and HBB-specific gRNA pair, ˜20% indels were detected by T7E1 analysis (Table 11). In contrast to adult CD34⁺ cells, a 2-hour incubation at 30° C. did not alter the level of gene editing as determined by either T7E1 analysis or DNA sequence analysis. In addition, doubling the D10A nickase RNP/gRNA concentration to 10 μg RNP per million cells nearly doubled the gene editing at the HBB locus to 57%, as determined by DNA sequencing analysis (Table 11, FIGS. 32A-32C). Stratification of DNA repair events through DNA sequencing analysis revealed that ˜50-70% of the sequence reads contained small insertions, ˜20-40% contained large deletions, and ˜8% showed evidence of HBB/HBD gene conversion events in the targeted HBB genomic location (FIG. 32C).

TABLE 11
Summary of gene editing results in CB CD34⁺ cells 72 hours after co-delivery of
D10A nickase RNP and HBB-specific gRNA pair.

| Total | | μg | μg | | | | |
|---|---|---|---|---|---|---|---|
| μg | μg D10A | HBB- | HBB- | Temperature | | | |
| D10A | RNP/1E6 | 8 | 15 | of 2-hour | Electroporation | % indels | % indels |
| RNP | cells | gRNA | gRNA | recovery | Program | (T7E1) | (sequencing) |
| 12.5 | 5 | 3.3 | 3.3 | 37° C. | 2 | 20 | 23 |
| 12.5 | 5 | 3.3 | 3.3 | 30° C. | 2 | 27 | 20 |
| 25 | 10 | 6.6 | 6.6 | 37° C. | 2 | 36 | 51 |

[1313] In contrast to adult CD34⁺ cells, CB CD34⁺ cells are fetal in origin and therefore the progeny of CB CD34⁺ cells express fetal hemoglobin (HbF) which contains γ-hemoglobin instead of β-hemoglobin. Given the lack of β-hemoglobin by CB eyrthroblasts, disruption of the HBB locus in this model system will not impact expression of hemoglobin protein. CB CD34⁺ cells are used as a model system for evaluation of gene editing in HSCs, since these umbilical cord blood derived CD34⁺ cells are more readily available for research use and reconstitute immune-deficient mouse xenografts more efficiently compared to adult CD34⁺ cells.

[1314] To determine whether gene edited cells retained their erythroid differentiation potential, the edited CD34⁺ cells were induced to differentiate into erythroblasts. Briefly, CD34⁺ cells were co-cultured with human plasma, holotransferrin, insulin, hydrocortisone, and cytokines (erythropoietin, SCF, IL3), for 20 days in which the latter 4 growth factors were added at different stages of differentiation to direct erythroid specification program. The cells were then evaluated by flow cytometry for the acquisition of erythroid phenotypic characteristics including: co-expression of the transferrin receptor (CD71) and Glycophorin A (CD235); expression of HbF, and enucleation (as indicated by the absence dsDNA detected by the dsDNA dye DRAQS) and loss of CD45 expression. By day 18 of differentiation, the erythroblast progeny of edited CD34⁺ cells possessed this red blood cell phenotype (FIGS. 33A-33C). These data, along with the CFC data shown in FIGS. 31A-31B show that the gene editing does not negatively impact the differentiation potential of CD34⁺ cells.

[1315] In summary, the data in this Example indicate: 1) electroporation of fresh CB CD34⁺ HSCs with D10A nickase and paired capped/tailed gRNAs does not impact cell viability, proliferation potential, or multipotency; and 2) contact between CB CD34⁺ HSCs and 10 μg D10A RNP (per million cells) supports >50% gene editing with HDR events (8% gene conversion events of total).

### Example 9: Contact Between S. pyogenes Wild-Type Cas9 RNP or D10A Nickase RNP Complexed to gRNAs Targeting the HBB Genetic Locus Supports Up to 60% Gene Editing in Human Cord Blood Hematopoietic Stem Cells

[1316] In this Example, umbilical cord blood (CB) CD34⁺ HSCs were contacted with S. pyogenes wild-type Cas9 RNP, N863A nickase RNP, or D10A nickase RNP complexed with 2 gRNAs targeting the HBB locus. The percentage of gene editing and type of editing event (e.g., HDR (e.g., gene conversion) or NHEJ) were evaluated to determine the optimal Cas9 activity (e.g., type of cut, e.g., double-strand break from wild-type Cas9 or off-set nicks on opposite DNA strands by nickases) for gene editing in HSCs that would favor HDR (e.g., gene conversion) over NHEJ (e.g., ends of the DNA left exposed after the cut, e.g., blunt ends left by wild-type Cas9 cut, 5′ overhang left by D10A nickase cut or 3′ overhang left by N863A nickase cut). Other optimizations included: 1) removal of endotoxin from Cas9 protein preparation to reduce toxicity of Cas9 protein; 2) use of 10 μg RNP per million CD34⁺ cells to increase gene editing (shown to double gene editing in fresh CB CD34⁺ cells compared to 5 μg RNP, as indicated in Example 8); 3) testing of human CD34⁺ cells that were isolated from cord blood (CB), cryopreserved, and confirm that gene editing was not impacted by cryopreservation (compared to freshly isolated HSCs, described in Example 8); and 4) evaluate Cas9 RNP levels in CD34⁺ cells over time to understand Cas9 RNP stability in HSCs.

[1317] Human CD34⁺ HSCs cells were isolated from freshly obtained human umbilical cord blood by ficoll gradient density centrifugation followed by MACS sorting with mouse anti-human CD34⁺ immunomagnetic beads. CD34₊ cells were cryopreserved, thawed at a later date, and plated into StemSpan Serum-Free Expansion Medium (SFEM™, StemCell Technologies) containing 100 ng/mL each of human stem cell factor (SCF) and flt-3 ligand (FL), 20 ng/mL each of thrombopoietin (TPO) and IL-6, and 10 μM PGE2 (Cayman Biochemicals; all other supplements were from PeproTech® unless otherwise indicated). Cells were grown for 3 days in a humidified incubator and 5% CO₂ 20% O₂. On day 3 (morning), media was replaced with fresh Stemspan-SFEM™ supplemented with human SCF, TPO, FL and PGE2. In the afternoon of day 3, 2.2 million CD34⁺ cells per sample were suspended in electroporation buffer.

[1318] The gRNAs were generated by in vitro transcription using a T7 polymerase. A 5′ ARCA cap was added to the RNA simultaneous to transcription while a polyA tail was added after transcription to the 3′ end of the RNA species by an E. coli polyA polymerase. After the gRNAs were in vitro transcribed and tailed, the quality and quantity of gRNAs were evaluated with the Bioanalyzer (Nanochip) to determine RNA concentration and by DSF assay performed as a measure of D10A Cas9 nickase RNP stability and as an indirect measure of gRNA quality.

[1319] In vitro transcribed capped and tailed guide gRNAs HBB-8 and HBB-15 were added at a 2:1 molar ratio (total gRNA:Cas9 protein) to 10 μg RNP per million cells. The RNPs tested include the following: wild-type (WT) Cas9, endotoxin-free WT Cas9, N863A nickase, D10A nickase. For each experimental sample, the DM RNP/cell mixture was transferred to the electroporation cartridge, and the cells then electroporated using Program 2 (P2).

[1320] For all samples, the cells were collected from the cartridge and placed at 37° C. for 20 minutes (recovery period). For the CB CD34⁺ cells that were contacted with 10 μg D10A nickase RNP (per million cells), one sample was transferred to pre-warmed cytokine supplemented Stemspan-SFEM™ media and placed at 30° C. for 2 hours (cold shock recovery) or placed directly into the same media at 37° C. For the cold shocked samples, the cells were transferred to the 37° C. incubator after the 2-hour incubation period at 30° C. At 24, 48, and 72 hours after electroporation, the CB CD34⁺ cells were counted by trypan blue exclusion (cell survival) and divided into 3 portions for the following analyses: a) flow cytometry analysis for assessment of viability by co-staining with 7-Aminoactinomycin-D (7-AAD) and allophycocyanin (APC)-conjugated Annexin-V antibody (ebioscience); b) flow cytometry analysis for maintenance of HSC phenotype (after co-staining with phycoerythrin (PE)-conjugated anti-human CD34 antibody (BD Biosciences) and APC-conjugated CD133 (Miltenyi Biotech; c) hematopoietic colony forming cell (CFC) analysis by plating 800 cells in semi-solid methylcellulose based Methocult medium (StemCell Technologies H4435) that supports differentiation of erythroid and myeloid blood cell colonies from HSCs and serves as a surrogate assay to evaluate HSC multipotency and differentiation potential ex vivo; d) genomic DNA analysis for detection of editing at the HBB locus; and e) Western blot analysis of protein to evaluate the stability of Cas9 RNP in CD34⁺ HSCs. gDNA was extracted from the HSCs at 48 and 72 hours after electroporation and HBB locus-specific PCR reactions were performed. The purified PCR products were analyzed for insertions/deletions (indels) in T7E1 assays and by DNA sequencing of individual clones (PCR product was transformed and subcloned into TOPO-vector, individual colonies picked, and plasmid DNA containing individual PCR products were sequenced).

[1321] Electroporated CB CD34⁺ cells maintained a stem cell phenotype (e.g., co-expression of CD34 and CD133, >90% CD34±CD133±) and as determined by flow cytometry analysis. The absolute number of viable CD34⁺ cells was maintained across most samples over a 72-hour culture period after electroporation (FIG. 34A). Gene edited CD34⁺ cells maintained ex vivo hematopoietic activity and multipotency as indicated by their ability to give rise to erythroid (e.g., CFU-E, or CFU-GEMM) and myeloid (e.g., CFU-G, -M, or -GM) (FIG. 34B).

[1322] Gene editing at the HBB locus was then evaluated at 72 hours after electroporation of WT Cas9, N863A, or D10A nickases co-delivered with 2 gRNAs (HBB-8 and HBB-15). Briefly, gDNA was isolated from electroporated CD34⁺ cells at 72 hours after electroporation, and PCR amplification of a ˜607 bp fragment of the HBB locus (which captured both of the individual genomic locations that were targeted by gRNAs HBB-8 and HBB-15) was performed. After cleanup of the HBB PCR product with AMPURE beads, insertions/deletions (indels) at the targeted genomic location were evaluated by T7E1 assay and by DNA sequencing. For the CD34⁺ cells electroporated with WT Cas9 and endotoxin-free WT Cas9 the percentages of indels detected by T7E1 analysis at 72 hours was 59% and 51%, respectively (FIG. 35A), which correlated with the indels detected by DNA sequencing (Table 12). CD34⁺ cells electroporation with N863A nickase and HBB-specific gRNA pair, had only 1% indels detected by T7E1 analysis. CD34⁺ HSCs electroporated with D10A nickase with and without cold shock supported gene editing at percentages of 39% and 48% indels detected by T7E1 analysis, respectively. In order to confirm that this low level of editing observed in CD34⁺ HSCs contacted with N863A nickase, was not due to the lack of N863A RNP contacting the cells, western blot analysis was performed (FIG. 35B).

[1323] Cas9 protein was present in all electroporated samples (e.g., cells that received WT Cas9, D10A nickase, and N863A nickase). For these samples, Cas9 protein was detected at 24 and 48 hours after electroporation, suggesting that the lack of N863A activity in the CD34+ HSCs was not due to the lack of protein.

[1324] Gene editing in CD34⁺ HSCs that contacted WT Cas9, endotoxin-free Cas9, and D10A nickase was 54-60%, based on DNA sequencing analysis (Table 12, FIG. 36A). Stratification of DNA repair events through DNA sequencing analysis revealed that >90% of the gene editing events were deletions in CD34⁺ HSCs that contacted WT Cas9 and endotoxin-free WT Cas9 (insertions or combination of insertion and deletion comprised the remaining 3-6% of editing events) (FIG. 36A). In contrast, gDNA from CD34⁺ HSCs that contacted D10A nickases had 3% HDR (e.g., gene conversion), up to 75% insertions, and up to 22% deletions (FIG. 36B).

[1325] In summary, the data in this Example indicate: 1) endotoxin removal does not negatively impact Cas9 functionality or CD34⁺ HSC cell viability, proliferation potential, or multipotency; 2) use of 10 μg D10A RNP supports 60% gene editing in CD34⁺ HSCs with HDR events (e.g., gene conversion); and 3) after contacting CD34⁺ HSCs, WT Cas9 and nickase RNPs are detected for up to 48 hours, but is not detectable thereafter.

TABLE 12
Summary of gene editing results in CB CD34⁺ cells 72 hours after co-delivery of
wild-type Cas9, N863A nickase, D10A nickase RNP and HBB-specific gRNA pair.

| | Total pg | Temperature | | | |
|---|---|---|---|---|---|
| | RNP/1E6 | of 2-hour | Electroporation | % indels | % indels |
| Cas9 | cells | recovery | Program | (T7E1) | (sequencing) |
| WT | 10 | 37° C. | 2 | 59 | 56 |
| Endo- | 10 | 37° C. | 2 | 51 | 60 |
| Free WT | | | | | |
| N863A | 10 | 37° C. | 2 | 1 | ND |
| D10A | 10 | 37° C. | 2 | 39 | 60 |
| D10A | 10 | 30° C. | 2 | 48 | 54 |

### Example 10: Gene Conversion Modulation

[1326] The CRISPR/Cas9 system was used to target the human HBB gene in the region of the sickle cell anemia-causing mutation.

[1327] The nature of the targeted break affects the frequency of different DNA repair outcomes. Blunt double-strand breaks, single-strand nicks, and dual-nicks in which the nicks are placed on opposite strands and leave either 3′ or 5′ overhangs of varying lengths, were introduced by utilizing the wild type Cas9 nuclease, as well as two different Cas9 nickases. Several different DNA repair outcomes including, e.g., indel mutations resulting from non-homologous end-joining (NHEJ) and homology-dependent repair (HDR) using the closely related HBD gene as an endogenous template, were characterized. The frequency of these various repair outcomes under different conditions offers insight into the mechanisms of DNA repair and how it is impacted by the nature of the DNA break. Here, we examined how different repair pathways affect the frequency of gene conversion (HDR from the closely related HBD gene as an endogenous template). Specifically, we evaluated the effect of down-regulation of the alternative NHEJ (alt-NHEJ) and HDR pathways on the gene conversion rate in the presence of dual-nicks.

[1328] In this study, different gRNAs targeting the HBB region that surround the nucleotides encoding the amino acid most commonly mutated in sickle cell disease were tested in 293T cells with wild type Cas9. The gRNAs that induced similar high rates of NHEJ and had PAMs facing in opposite orientations were selected to test as pairs with Cas9 D10A (which would generate a 5′ overhang) and Cas9 N863A nickases (which would generate a 3′ overhang).

[1329] As a first example of enzymes that modulate gene conversion frequency, we selected the polymerase Pol theta, which is a central player in the alt-NHEJ pathway. In this example, U2OS cells were electroporated with 200 ng of each gRNA (8 and 15), 750 ng of plasmid that encodes wild type Cas9 or mutant Cas9 (D10A or N863A) and 30 pmol of scrambled siRNA as a negative control or 30 pmol of siRNA against Pol Theta. Cells were collected 6 days after electroporation and genomic DNA was extracted. PCR amplification of the HBB locus was performed and subcloned into a Topo Blunt Vector. For each condition in each experiment 96 colonies were sequenced with Sanger sequencing.

[1330] As shown in FIG. 37, down regulation of Pol theta in the context of the D10A Cas9 does not affect the gene editing profile. In contrast, Pol theta down-regulation in the context of the N863A Cas9 nuclease leads to a strong reduction of the insertion frequency and an increase in the gene conversion rate. These data suggest that the 3′ protruding ends generated by the N863A Cas9 nuclease are substrates for processing by Pol Theta, resulting in a high accumulation of insertions. Upon down-regulation of Pol Theta, the 3′ protruding DNA ends are available for engaging the gene conversion pathway (FIG. 37).

[1331] Next, we dissected the genetic requirements of the gene conversion pathway in the context of different Cas9 nucleases (FIG. 38), using BRCA2 and RAD51—central players of canonical HR—as an example. U2OS cell were electroporated with 200 ng of each gRNA (8 and 15), 750 ng of plasmid that encodes wild type Cas9 or mutant Cas9 (D10A or N863A) and 30 pmol of scrambled siRNA as a negative control or 30 pmol of siRNA against BRCA2 or RAD51. As shown in FIG. 38, the majority of the gene conversion events are mediated by BRCA2 and RAD51. These data are consistent with the notion that gene conversion using the HBD gene as a donor in cis is an event mediated by canonical HR.

[1332] In summary, different DNA ends engage different repair pathways. FIG. 39 depicts a model of the genetic requirements of the gene conversion pathway in the context of different Cas9 nucleases (wild type, D10A or N863A). Use of a Cas9 nickase with two gRNAs generates either 3′ or 5′ overhangs, which are most likely not suitable substrates to be repaired by canonical NHEJ, but can be repaired by alternative pathways. The 3′ end is predominantly a substrate for repair by the Alt NHEJ. The key player in the pathway is Pol Theta, which refills the ends, thereby generating insertions deriving from the overhangs.

[1333] The 5′ protruding end is mostly repaired through gene conversion, in which the HBB gene is repaired using the homologous HBD locus as a template. This pathway is dependent on BRCA2 and RAD51, which suggests the action of the canonical HR pathway.

[1334] In conclusion, these data support a therapeutic approach in which correction of the sickle-cell mutation is efficiently mediated through HDR from the endogenous HBD gene, and it elucidates strategies of how to promote or suppress this event.

### Example 11: CRISPR/Cas9 RNP Supports Gene Editing of T Lymphocytes Derived from a Sickle Cell Disease Patient Ex Vivo

[1335] To determine whether Cas9 RNP mediated gene editing could correct the sickle cell disease (SCD) mutation, peripheral blood mononuclear cells (MNCs) from a SCD patient were obtained (Conversant Bio). To expand the T lymphocyte fraction from bulk MNCs, MNCs were thawed into T cell culture media (X-VIVO 15 supplemented with human AB serum, N-acetylcysteine, Glutamax (L-glutamine), and human cytokines (IL-2, IL-7, IL-15)). The T lymphocyte fraction was activated with CD3/CD28 immunomagnetic beads. By day 3 of MNC culture in T cell media, the cell population was 72% CD3±. After 7 days, a population comprising >98% CD3⁺ T lymphocytes was obtained, most of which were also CD4⁺ (FIG. 40A). Genomic DNA (gDNA) was extracted from the CD3⁺ T lymphocytes and sequenced to confirm the presence of the SCD mutation.

[1336] After confirmation of the sickle mutation in the CD3⁺ T lymphocytes, gRNA was designed to target the SCD mutation (HBB-8-sickle gRNA targeting sequence: GUAACGGCAGACUUCUCCAC (SEQ ID NO:16318), underline indicates SCD mutation). The gRNA was in vitro transcribed from a DNA PCR product template. The HBB-8-sickle was modified to contain a 5′ ARCA cap and a 3′ polyA tail. Another gRNA HBB-15 (SEQ ID NO:387) was also in vitro transcribed and was modified to contain a 5′ ARCA cap and a 3′ polyA tail. The gRNAs were complexed to S. pyogenes Cas9 D10A nickase protein for RNP production.

[1337] To evaluate Cas RNP editing in SCD patient cells, 2×10⁶ cells were electroporated with Cas9 D10A nickase RNP, in which the nickase was complexed to 2 different gRNA pairs to target the sequence specific to the HBB gDNA of SCD patients (HBB-8-sickle and HBB-15). Dual D10A nickase RNP (10 μg per 1×10⁶ cells) was co-electroporated with a single strand oligonucleotide donor (SSODN, 250 pmoles per 1×10⁶ cells). After electroporation, cells were plated onto T cell media with or without CD3/CD28 immunomagnetic beads to determine whether restimulation of T cells after electroporation would improve survival and viability of the gene-edited cells. Re-plating the edited cells into culture with CD3/CD28 beads for cell reactivation improved the total viability of the electroporated cells in comparison to cells plated in T cell media without CD3/CD28 beads (% viability determined by flow cytometry analysis after staining with apoptosis stains 7-AAD and Annexin V; FIG. 40B). Gene editing was evaluated by DNA sequencing. The gRNA combination HBB-8-sickle and HBB-15 (each complexed to Cas9 D10A nickase) supported 48% total editing, as detected by T7E1 endonuclease assay analysis of the HBB PCR product (FIG. 40C). Ten percent higher editing was detected in gDNA from the T lymphocytes that were reactivated with CD3/CD28 beads after electroporation, compared to cells cultured in T cell medial alone. These data show that Cas9 RNP targeting the SCD mutation supports gene editing in SCD patient cells.

### Incorporation by Reference

[1338] All publications, patents, and patent applications mentioned herein are hereby incorporated by reference in their entirety as if each individual publication, patent or patent application was specifically and individually indicated to be incorporated by reference. In case of conflict, the present application, including any definitions herein, will control.

### EQUIVALENTS

[1339] Those skilled in the art will recognize, or be able to ascertain using no more than routine experimentation, many equivalents to the specific embodiments of the invention described herein. Such equivalents are intended to be encompassed by the following claims.

### REFERENCES

[1340] Anders et al. Nature 513(7519):569-573 (2014)
[1341] Bae et al. Bioinformatics 30(10):1473-1475 (2014)
[1342] Caldecott Nat. Rev. Genet. 9(8):619-631 (2008)
[1343] Cong et al. Science 399(6121):819-823 (2013)
[1344] Chylinski et al. RNA Biol. 10(5):726-737 (2013)
[1345] Deveau et al. J. Bacteriol. 190(4): 1390-1400 (2008)
[1346] Esvelt et al. Nature 472(7344): 499-503 (2011)
[1347] Friedland et al. Genome Biol. 16:257 (2015)
[1348] Fu et al. Nat. Biotechnol. 32:279-284 (2014)
[1349] Haft et al. PLoS Computational Biology 1(6): e60 (2005)
[1350] Heigwer et al. Nat. Methods 11(2):122-3 (2014)
[1351] Horvath et al. Science 327(5962): 167-170 (2010)
[1352] Hsu et al. Nat. Biotechnol. 31(9): 827-32 (2013)
[1353] Jinek et al. Science 337(6096):816-821 (2012)
[1354] Jinek et al. Science 343(6176):1247997 (2014)
[1355] Kleinstiver et al. Nat. Biotechnol. 33(12):1293-8 (2015)
[1356] Lee et al. Nano Lett. 12(12):6322-6327 (2012)
[1357] Li Cell. Res. 18(1):85-98 (2008)
[1358] Makarova et al. Nature Review Microbiology 9:467-477 (2011)
[1359] Mali et al. Science 399(6121): 823-826 (2013)
[1360] Marteijn et al. Nat. Rev. Mol. Cell. Biol. 15(7):465-481 (2014)
[1361] Mayle et al. Science 349: 742-47 (2015)
[1362] Neelsen and Lopes Nat. Rev. Mol. Cell. Biol. 16: 207-20 (2015)
[1363] Nishimasu et al. Cell 156(5):935-949 (2014)
[1364] Ran et al. Cell 154(6): 1380-1389 (2013)
[1365] Saleh-Gohari et al. Mol. Cell. Biol. 25: 7158-69 (2005)
[1366] Schlacher et al. Cancer Cell 22: 106-16 (2012)
[1367] Sternberg et al. Nature 507(7490):62-67 (2014)
[1368] Wang et al. Cell 153(4):910-918 (2013)
[1369] Xiao A. et al. Bioinformatics 30 (8):1180-1182 (2014)
[1370] Zellweger et al. J. Cell. Biol. 205: 563-79 (2015)
[1371] Zhou et al., Nucleic Acids Res. 42(3):e19 (2014)

1-46. (canceled)

47. A method of modifying a target gene in a cell, the method comprising:
contacting the cell in vitro or ex vivo with a first gRNA molecule, a first enzymatically active Cas9 (eaCas9) molecule, a second gRNA molecule, and a second eaCas9 molecule;
wherein the first gRNA molecule and the first eaCas9 molecule associate with the target gene and generate a first single strand cleavage event on a first strand of the target gene;
wherein the second gRNA molecule and the second eaCas9 molecule associate with the target gene and generate a second single strand cleavage event on a second strand of the target gene, thereby forming a double strand break having a first overhang and a second overhang;
wherein the first overhang is a 5′ overhang, and the second overhang is a 5′ overhang;
wherein the first overhang and the second overhang in the target gene are repaired by gene conversion using an endogenous homologous region;
wherein the endogenous homologous region is a sequence from a different gene; and
wherein the cell is not contacted with an exogenous nucleic acid homologous to the target gene,
thereby modifying the target gene in the cell.

48. The method of claim 47, wherein, after repair of the first overhang and the second overhang, the target gene comprises the sequence of the endogenous homologous region.

49. The method of claim 47, wherein the method is used to correct a mutation in the target gene, and wherein the mutation in the target gene is located
(a) between the first single strand break and the second single strand break,
(b) within fewer than 50 nucleotides of the first single strand break, or
(c) within fewer than 50 nucleotides of the second single strand break.

50. The method of claim 47, wherein the target gene has at least 90% sequence homology with the endogenous homologous region.

51. The method of claim 47, wherein the first eaCas9 molecule is a first nickase molecule and the second eaCas9 molecule is a second nickase molecule.

52. The method of claim 51, wherein t first eaCas9 molecule and the second eaCas9 molecule are the same eaCas9 nickase molecule.

53. The method of claim 52, wherein the eaCas9 nickase molecule is an HNH-like domain nickase.

54. The method of claim 53, wherein the eaCas9 molecule comprises a mutation at an amino acid position corresponding to amino acid position D10 of Streptococcus pyogenes Cas9.

55. The method of claim 47, wherein the method is used to correct mutation in an endogenous hemoglobin beta (HBB) target gene, and wherein the mutation in the endogenous HBB target gene causes sickle cell disease or beta-thalassemia.

56. The method of claim 55, wherein the first gRNA molecule is a gRNA molecule comprising SEQ ID NO:387, and wherein the second gRNA molecule is a gRNA molecule comprising SEQ ID NO:16318.

57. The method of claim 47, wherein the first gRNA molecule is a gRNA molecule comprising any one of SEQ ID NOs: 387-485, 6803-6871, or 16010-16256, and wherein the second gRNA molecule is a gRNA molecule comprising any one of SEQ ID NOs: 387-485, 6803-6871, or 16010-16256.

58. The method of claim 47, wherein the cell is a population of cells, and wherein the first overhang and the second overhang in the target gene are repaired by gene conversion in about 12% to about 45% of the cells in the population of cells.

59. The method of claim 47, wherein the cell is a population of cells, and wherein the first overhang and the second overhang in the target gene are repaired by non-homologous end joining (NHEJ) in less than 40% of the cells in the population of cells.

60. The method of claim 47, wherein the cell is a mammalian cell.

61. The method of claim 60, wherein the mammalian cell is a human cell.

62. The method of claim 47, wherein the cell is a blood cell or a stem cell.

63. A method of treating a disease in a subject having a mutation in an endogenous HBB target gene, the method comprising
contacting a cell from the subject with a first gRNA molecule, a first enzymatically active Cas9 (eaCas9) molecule, a second gRNA molecule, and a second eaCas9 molecule;
wherein the first gRNA molecule and the first eaCas9 molecule associate with the HBB target gene and generate a first single strand cleavage event on a first strand of the HBB target gene;
wherein the second gRNA molecule and the second eaCas9 molecule associate with the HBB target gene and generate a second single strand cleavage event on a second strand of the HBB target gene, thereby forming a double strand break having a first overhang and a second overhang;
wherein the first overhang and the second overhang in the HBB target gene are repaired by gene conversion using an endogenous homologous region of an endogenous HBD gene which does not comprise the mutation, correcting the mutation in the endogenous HBB target gene in the cell;
and wherein the cell is not contacted with an exogenous nucleic acid homologous to the HBB target gene,
thereby treating the disease in the subject having the mutation in the endogenous HBB target gene.

64. The method of claim 63, wherein e disease is beta thalassemia or sickle cell disease.

65. A method of increasing the percentage of cells in a population of cells that modify a target region of a target gene by gene conversion using an endogenous homologous region, the method comprising
contacting the population of cells with a first gRNA molecule, a first enzymatically active Cas9 (eaCas9) molecule, a second gRNA molecule, and a second eaCas9 molecule;
wherein the first gRNA molecule and the first eaCas9 molecule associate with the target gene and generate a first single strand cleavage event on a first strand of the target gene;
wherein the second gRNA molecule and the second eaCas9 molecule associate with the target gene and generate a second single strand cleavage event on a second strand of the target gene, thereby forming a double strand break having a first 5′ overhang and a second 5′ overhang; and
wherein the first 5′ overhang and the second 5′ overhang in the target gene are repaired by gene conversion using the endogenous homologous region,
thereby increasing the percentage of cells in the population of cells that modify the target region of the target gene by gene conversion using the endogenous homologous region.

66. The method of claim 65, wherein the first 5′ overhang and the second 5′ overhang in the target gene are repaired by gene conversion in about 12% to about 45% of the cells in the population of cells.

The application's sequence listing, which the Patent Office published only in electronic form, follows.

SEQUENCE LISTING (16330 sequences)

SEQ ID NO: 1 - protein, 1344 aa, Streptococcus mutans
KKPYSIGLDIGTNSVGWAVVTDDYKVPAKKMKVLGNTDKSHIEKNLLGALLFDSGNTAEDRRLKRTARRRYTRRRNRILYLQEIFSEEMGKVDDSFFHRLEDSFLVTEDKRGERHPIFGNLEEEVKYHENFPTIYHLRQYLADNPEKVDLRLVYLALAHIIKFRGHFLIEGKFDTRNNDVQRLFQEFLAVYDNTFENSSLQEQNVQVEEILTDKISKSAKKDRVLKLFPNEKSNGRFAEFLKLIVGNQADFKKHFELEEKAPLQFSKDTYEEELEVLLAQIGDNYAELFLSAKKLYDSILLSGILTVTDVGTKAPLSASMIQRYNEHQMDLAQLKQFIRQKLSDKYNEVFSDVSKDGYAGYIDGKTNQEAFYKYLKGLLNKIEGSGYFLDKIEREDFLRKQRTFDNGSIPHQIHLQEMRAIIRRQAEFYPFLADNQDRIEKLLTFRIPYYVGPLARGKSDFAWLSRKSADKITPWNFDEIVDKESSAEAFINRMTNYDLYLPNQKVLPKHSLLYEKFTVYNELTKVKYKTEQGKTAFFDANMKQEIFDGVFKVYRKVTKDKLMDFLEKEFDEFRIVDLTGLDKENKVFNASYGTYHDLCKILDKDFLDNSKNEKILEDIVLTLTLFEDREMIRKRLENYSDLLTKEQVKKLERRHYTGWGRLSAELIHGIRNKESRKTILDYLIDDGNSNRNFMQLINDDALSFKEEIAKAQVIGETDNLNQVVSDIAGSPAIKKGILQSLKIVDELVKIMGHQPENIVVEMARENQFTNQGRRNSQQRLKGLTDSIKEFGSQILKEHPVENSQLQNDRLFLYYLQNGRDMYTGEELDIDYLSQYDIDHIIPQAFIKDNSIDNRVLTSSKENRGKSDDVPSKDVVRKMKSYWSKLLSAKLITQRKFDNLTKAERGGLTDDDKAGFIKRQLVETRQITKHVARILDERFNTETDENNKKIRQVKIVTLKSNLVSNFRKEFELYKVREINDYHHAHDAYLNAVIGKALLGVYPQLEPEFVYGDYPHFHGHKENKATAKKFFYSNIMNFFKKDDVRTDKNGEIIWKKDEHISNIKKVLSYPQVNIVKKVEEQTGGFSKESILPKGNSDKLIPRKTKKFYWDTKKYGGFDSPIVAYSILVIADIEKGKSKKLKTVKALVGVTIMEKMTFERDPVAFLERKGYRNVQEENIIKLPKYSLFKLENGRKRLLASARELQKGNEIVLPNHLGTLLYHAKNIHKVDEPKHLDYVDKHKDEFKELLDVVSNFSKKYTLAEGNLEKIKELYAQNNGEDLKELASSFINLLTFTAIGAPATFKFFDKNIDRKRYTSTTEILNATLIHQSITGLYETRIDLNKLGGD

SEQ ID NO: 2 - protein, 1367 aa, Streptococcus pyogenes
DKKYSIGLDIGTNSVGWAVITDEYKVPSKKFKVLGNTDRHSIKKNLIGALLFDSGETAEATRLKRTARRRYTRRKNRICYLQEIFSNEMAKVDDSFFHRLEESFLVEEDKKHERHPIFGNIVDEVAYHEKYPTIYHLRKKLVDSTDKADLRLIYLALAHMIKFRGHFLIEGDLNPDNSDVDKLFIQLVQTYNQLFEENPINASGVDAKAILSARLSKSRRLENLIAQLPGEKKNGLFGNLIALSLGLTPNFKSNFDLAEDAKLQLSKDTYDDDLDNLLAQIGDQYADLFLAAKNLSDAILLSDILRVNTEITKAPLSASMIKRYDEHHQDLTLLKALVRQQLPEKYKEIFFDQSKNGYAGYIDGGASQEEFYKFIKPILEKMDGTEELLVKLNREDLLRKQRTFDNGSIPHQIHLGELHAILRRQEDFYPFLKDNREKIEKILTFRIPYYVGPLARGNSRFAWMTRKSEETITPWNFEEVVDKGASAQSFIERMTNFDKNLPNEKVLPKHSLLYEYFTVYNELTKVKYVTEGMRKPAFLSGEQKKAIVDLLFKTNRKVTVKQLKEDYFKKIECFDSVEISGVEDRFNASLGTYHDLLKIIKDKDFLDNEENEDILEDIVLTLTLFEDREMIEERLKTYAHLFDDKVMKQLKRRRYTGWGRLSRKLINGIRDKQSGKTILDFLKSDGFANRNFMQLIHDDSLTFKEDIQKAQVSGQGDSLHEHIANLAGSPAIKKGILQTVKVVDELVKVMGRHKPENIVIEMARENQTTQKGQKNSRERMKRIEEGIKELGSQILKEHPVENTQLQNEKLYLYYLQNGRDMYVDQELDINRLSDYDVDHIVPQSFLKDDSIDNKVLTRSDKNRGKSDNVPSEEVVKKMKNYWRQLLNAKLITQRKFDNLTKAERGGLSELDKAGFIKRQLVETRQITKHVAQILDSRMNTKYDENDKLIREVKVITLKSKLVSDFRKDFQFYKVREINNYHHAHDAYLNAVVGTALIKKYPKLESEFVYGDYKVYDVRKMIAKSEQEIGKATAKYFFYSNIMNFFKTEITLANGEIRKRPLIETNGETGEIVWDKGRDFATVRKVLSMPQVNIVKKTEVQTGGFSKESILPKRNSDKLIARKKDWDPKKYGGFDSPTVAYSVLVVAKVEKGKSKKLKSVKELLGITIMERSSFEKNPIDFLEAKGYKEVKKDLIIKLPKYSLFELENGRKRMLASAGELQKGNELALPSKYVNFLYLASHYEKLKGSPEDNEQKQLFVEQHKHYLDEIIEQISEFSKRVILADANLDKVLSAYNKHRDKPIREQAENIIHLFTLTNLGAPAAFKYFDTTIDRKRYTSTKEVLDATLIHQSITGLYETRIDLSQLGGD

SEQ ID NO: 3 - protein, 1387 aa, Streptococcus thermophilus
TKPYSIGLDIGTNSVGWAVTTDNYKVPSKKMKVLGNTSKKYIKKNLLGVLLFDSGITAEGRRLKRTARRRYTRRRNRILYLQEIFSTEMATLDDAFFQRLDDSFLVPDDKRDSKYPIFGNLVEEKAYHDEFPTIYHLRKYLADSTKKADLRLVYLALAHMIKYRGHFLIEGEFNSKNNDIQKNFQDFLDTYNAIFESDLSLENSKQLEEIVKDKISKLEKKDRILKLFPGEKNSGIFSEFLKLIVGNQADFRKCFNLDEKASLHFSKESYDEDLETLLGYIGDDYSDVFLKAKKLYDAILLSGFLTVTDNETEAPLSSAMIKRYNEHKEDLALLKEYIRNISLKTYNEVFKDDTKNGYAGYIDGKTNQEDFYVYLKKLLAEFEGADYFLEKIDREDFLRKQRTFDNGSIPYQIHLQEMRAILDKQAKFYPFLAKNKERIEKILTFRIPYYVGPLARGNSDFAWSIRKRNEKITPWNFEDVIDKESSAEAFINRMTSFDLYLPEEKVLPKHSLLYETFNVYNELTKVRFIAESMRDYQFLDSKQKKDIVRLYFKDKRKVTDKDIIEYLHAIYGYDGIELKGIEKQFNSSLSTYHDLLNIINDKEFLDDSSNEAIIEEIIHTLTIFEDREMIKQRLSKFENIFDKSVLKKLSRRHYTGWGKLSAKLINGIRDEKSGNTILDYLIDDGISNRNFMQLIHDDALSFKKKIQKAQIIGDEDKGNIKEVVKSLPGSPAIKKGILQSIKIVDELVKVMGGRKPESIVVEMARENQYTNQGKSNSQQRLKRLEKSLKELGSKILKENIPAKLSKIDNNALQNDRLYLYYLQNGKDMYTGDDLDIDRLSNYDIDHIIPQAFLKDNSIDNKVLVSSASNRGKSDDVPSLEVVKKRKTFWYQLLKSKLISQRKFDNLTKAERGGLSPEDKAGFIQRQLVETRQITKHVARLLDEKFNNKKDENNRAVRTVKIITLKSTLVSQFRKDFELYKVREINDFHHAHDAYLNAVVASALLKKYPKLEPEFVYGDYPKYNSFRERKSATEKVYFYSNIMNIFKKSISLADGRVIERPLIEVNEETGESVWNKESDLATVRRVLSYPQVNVVKKVEEQNHGLDRGKPKGLFNANLSSKPKPNSNENLVGAKEYLDPKKYGGYAGISNSFTVLVKGTIEKGAKKKITNVLEFQGISILDRINYRKDKLNFLLEKGYKDIELIIELPKYSLFELSDGSRRMLASILSTNNKRGEIHKGNQIFLSQKFVKLLYHAKRISNTINENHRKYVENHKKEFEELFYYILEFNENYVGAKKNGKLLNSAFQSWQNHSIDELCSSFIGPTGSERKGLFELTSRGSAADFEFLGVKIPRYRDYTPSSLLKDATLIHQSVTGLYETRIDLAKLGEG

SEQ ID NO: 4 - protein, 1333 aa, Listeria innocua
KKPYTIGLDIGTNSVGWAVLTDQYDLVKRKMKIAGDSEKKQIKKNFWGVRLFDEGQTAADRRMARTARRRIERRRNRISYLQGIFAEEMSKTDANFFCRLSDSFYVDNEKRNSRHPFFATIEEEVEYHKNYPTIYHLREELVNSSEKADLRLVYLALAHIIKYRGNFLIEGALDTQNTSVDGIYKQFIQTYNQVFASGIEDGSLKKLEDNKDVAKILVEKVTRKEKLERILKLYPGEKSAGMFAQFISLIVGSKGNFQKPFDLIEKSDIECAKDSYEEDLESLLALIGDEYAELFVAAKNAYSAVVLSSIITVAETETNAKLSASMIERFDTHEEDLGELKAFIKLHLPKHYEEIFSNTEKHGYAGYIDGKTKQADFYKYMKMTLENIEGADYFIAKIEKENFLRKQRTFDNGAIPHQLHLEELEAILHQQAKYYPFLKENYDKIKSLVTFRIPYFVGPLANGQSEFAWLTRKADGEIRPWNIEEKVDFGKSAVDFIEKMTNKDTYLPKENVLPKHSLCYQKYLVYNELTKVRYINDQGKTSYFSGQEKEQIFNDLFKQKRKVKKKDLELFLRNMSHVESPTIEGLEDSFNSSYSTYHDLLKVGIKQEILDNPVNTEMLENIVKILTVFEDKRMIKEQLQQFSDVLDGVVLKKLERRHYTGWGRLSAKLLMGIRDKQSHLTILDYLMNDDGLNRNLMQLINDSNLSFKSIIEKEQVTTADKDIQSIVADLAGSPAIKKGILQSLKIVDELVSVMGYPPQTIVVEMARENQTTGKGKNNSRPRYKSLEKAIKEFGSQILKEHPTDNQELRNNRLYLYYLQNGKDMYTGQDLDIHNLSNYDIDHIVPQSFITDNSIDNLVLTSSAGNREKGDDVPPLEIVRKRKVFWEKLYQGNLMSKRKFDYLTKAERGGLTEADKARFIHRQLVETRQITKNVANILHQRFNYEKDDHGNTMKQVRIVTLKSALVSQFRKQFQLYKVRDVNDYHHAHDAYLNGVVANTLLKVYPQLEPEFVYGDYHQFDWFKANKATAKKQFYTNIMLFFAQKDRIIDENGEILWDKKYLDTVKKVMSYRQMNIVKKTEIQKGEFSKATIKPKGNSSKLIPRKTNWDPMKYGGLDSPNMAYAVVIEYAKGKNKLVFEKKIIRVTIMERKAFEKDEKAFLEEQGYRQPKVLAKLPKYTLYECEEGRRRMLASANEAQKGNQQVLPNHLVTLLHHAANCEVSDGKSLDYIESNREMFAELLAHVSEFAKRYTLAEANLNKINQLFEQNKEGDIKAIAQSFVDLMAFNAMGAPASFKFFETTIERKRYNNLKELLNSTIIYQSITGLYESRKRLDD

SEQ ID NO: 5 - RNA, 96 nt, Artificial Sequence
  Synthetic oligonucleotide
  misc_feature (1)..(20): a, c, u, g, unknown or other
nnnnnnnnnnnnnnnnnnnnguuuuagagcuagaaauagcaaguuaaaauaaggcuaguccguuaucaacuugaaaaaguggcaccgagucggugc

SEQ ID NO: 6 - protein, 1082 aa, Neisseria meningitidis
MAAFKPNSINYILGLDIGIASVGWAMVEIDEEENPIRLIDLGVRVFERAEVPKTGDSLAMARRLARSVRRLTRRRAHRLLRTRRLLKREGVLQAANFDENGLIKSLPNTPWQLRAAALDRKLTPLEWSAVLLHLIKHRGYLSQRKNEGETADKELGALLKGVAGNAHALQTGDFRTPAELALNKFEKESGHIRNQRSDYSHTFSRKDLQAELILLFEKQKEFGNPHVSGGLKEGIETLLMTQRPALSGDAVQKMLGHCTFEPAEPKAAKNTYTAERFIWLTKLNNLRILEQGSERPLTDTERATLMDEPYRKSKLTYAQARKLLGLEDTAFFKGLRYGKDNAEASTLMEMKAYHAISRALEKEGLKDKKSPLNLSPELQDEIGTAFSLFKTDEDITGRLKDRIQPEILEALLKHISFDKFVQISLKALRRIVPLMEQGKRYDEACAEIYGDHYGKKNTEEKIYLPPIPADEIRNPVVLRALSQARKVINGVVRRYGSPARIHIETAREVGKSFKDRKEIEKRQEENRKDREKAAAKFREYFPNFVGEPKSKDILKLRLYEQQHGKCLYSGKEINLGRLNEKGYVEIDHALPFSRTWDDSFNNKVLVLGSENQNKGNQTPYEYFNGKDNSREWQEFKARVETSRFPRSKKQRILLQKFDEDGFKERNLNDTRYVNRFLCQFVADRMRLTGKGKKRVFASNGQITNLLRGFWGLRKVRAENDRHHALDAVVVACSTVAMQQKITRFVRYKEMNAFDGKTIDKETGEVLHQKTHFPQPWEFFAQEVMIRVFGKPDGKPEFEEADTLEKLRTLLAEKLSSRPEAVHEYVTPLFVSRAPNRKMSGQGHMETVKSAKRLDEGVSVLRVPLTQLKLKDLEKMVNREREPKLYEALKARLEAHKDDPAKAFAEPFYKYDKAGNRTQQVKAVRVEQVQKTGVWVRNHNGIADNATMVRVDVFEKGDKYYLVPIYSWQVAKGILPDRAVVQGKDEEDWQLIDDSFNFKFSLHPNDLVEVITKKARMFGYFASCHRGTGNINIRIHDLDHKIGKNGILEGIGVKTALSFQKYQIDELGKEIRPCRLKKRPPVR

SEQ ID NO: 7 - protein, 1368 aa, Streptococcus pyogenes [sequence omitted]

SEQ ID NO: 8 - protein, 12 aa, Artificial Sequence
  Synthetic peptide
  VARIANT (2)..(2): Xaa is Ile or Val or Met or Leu or Thr
  VARIANT (4)..(4): Xaa is Thr or Ile or Val or Ser or Asn or Tyr or Glu or Leu
  VARIANT (5)..(5): Xaa is Asn or Ser or Gly or Ala or Asp or Thr or Arg or Met or Phe
  VARIANT (6)..(6): Xaa is Ser or Tyr or Asn or Phe
  VARIANT (7)..(7): Xaa is Val or Ile or Leu or Cys or Thr or Phe
  VARIANT (9)..(9): Xaa is Trp or Phe or Val or Tyr or Ser or Leu
  VARIANT (10)..(10): Xaa is Ala or Ser or Cys or Val or Gly
  VARIANT (11)..(11): Xaa is Val or Ile or Leu or Ala or Met or His
  VARIANT (12)..(12): Any amino acid or absent
DXGXXXXGXXXX

SEQ ID NO: 9 - protein, 12 aa, Artificial Sequence
  Synthetic peptide
  VARIANT (2)..(2): Xaa is Ile or Val or Met or Leu or Thr
  VARIANT (4)..(4): Xaa is Thr or Ile or Val or Ser or Asn or Tyr or Glu or Leu
  VARIANT (5)..(5): Xaa is Asn or Ser or Gly or Ala or Asp or Thr or Arg or Met or Phe
  VARIANT (7)..(7): Xaa is Val or Ile or Leu or Cys or Thr or Phe
  VARIANT (9)..(9): Xaa is Trp or Phe or Val or Tyr or Ser or Leu
  VARIANT (10)..(10): Xaa is Ala or Ser or Cys or Val or Gly
  VARIANT (11)..(11): Xaa is Val or Ile or Leu or Ala or Met or His
  VARIANT (12)..(12): Any amino acid or absent
DXGXXSXGXXXX

SEQ ID NO: 10 - protein, 12 aa, Artificial Sequence
  Synthetic peptide
  VARIANT (4)..(4): Xaa is Thr or Ile or Val or Ser or Asn or Tyr or Glu or Leu
  VARIANT (5)..(5): Xaa is Asn or Ser or Gly or Ala or Asp or Thr or Arg or Met or Phe
  VARIANT (11)..(11): Xaa is Val or Ile or Leu or Ala or Met or His
  VARIANT (12)..(12): Any amino acid or absent
DIGXXSVGWAXX

SEQ ID NO: 11 - protein, 12 aa, Artificial Sequence
  Synthetic peptide
  MOD_RES (12)..(12): Any non-polar alkyl amino acid or a hydroxyl amino acid
DIGTNSVGWAVX

SEQ ID NO: 12 - protein, 8 aa, Artificial Sequence
  Synthetic peptide
  VARIANT (2)..(2): Xaa is Val or His
  VARIANT (3)..(3): Xaa is Ile or Leu or Val
  VARIANT (5)..(5): Xaa is Met or Thr
IXXEXARE

SEQ ID NO: 13 - protein, 8 aa, Artificial Sequence
  Synthetic peptide
  VARIANT (3)..(3): Xaa is Ile or Leu or Val
IVXEMARE

SEQ ID NO: 14 - protein, 8 aa, Artificial Sequence
  Synthetic peptide
  VARIANT (4)..(4): Xaa is His or Leu
  VARIANT (7)..(7): Xaa is Arg or Val
  VARIANT (8)..(8): Xaa is Glu or Val
HHAXDAXX

SEQ ID NO: 15 - protein, 8 aa, Artificial Sequence
  Synthetic peptide
HHAHDAYL

SEQ ID NO: 16 - protein, 30 aa, Artificial Sequence
  Synthetic polypeptide
  VARIANT (2)..(2): Xaa is Lys or Pro
  VARIANT (4)..(4): Xaa is Val or Leu or Ile or Phe
  VARIANT (5)..(5): Xaa is Gly or Ala or Ser
  VARIANT (6)..(6): Xaa is Leu or Ile or Val or Phe
  MOD_RES (7)..(26): Any amino acid and this region may encompass 5-20 residues wherein some positions may be absent
  VARIANT (29)..(29): Xaa is Asp or Glu or Asn or Gln
KXYXXXXXXXXXXXXXXXXXXXXXXXTDXY

SEQ ID NO: 17 - protein, 27 aa, Artificial Sequence
  Synthetic peptide
  VARIANT (1)..(1): Xaa is Asp or Glu or Gln or Asn
  VARIANT (2)..(2): Xaa is Leu or Ile or Arg or Gln or Val or Met or Lys
  VARIANT (3)..(3): Xaa is Asp or Glu
  VARIANT (5)..(5): Xaa is Ile or Val or Thr or Ala or Leu
  VARIANT (6)..(6): Xaa is Val or Tyr or Ile or Leu or Phe or Trp
  VARIANT (8)..(8): Xaa is Gln or His or Arg or Lys or Tyr or Ile or Leu or Phe or Trp
  VARIANT (9)..(9): Xaa is Ser or Ala or Asp or Thr or Lys
  VARIANT (10)..(10): Xaa is Phe or Leu or Val or Lys or Tyr or Met or Ile or Arg or Ala or Glu or Asp or Gln
  VARIANT (11)..(11): Xaa is Leu or Arg or Thr or Ile or Val or Ser or Cys or Tyr or Lys or Phe or Gly
  VARIANT (12)..(12): Xaa is Lys or Gln or Tyr or Thr or Phe or Leu or Trp or Met or Ala or Glu or Gly or Ser
  VARIANT (13)..(13): Xaa is Asp or Ser or Asn or Arg or Leu or Thr
  VARIANT (14)..(14): Xaa is Asp or Asn or Ser
  VARIANT (15)..(15): Xaa is Ser or Ala or Thr or Gly or Arg
  VARIANT (16)..(16): Xaa is Ile or Leu or Phe or Ser or Arg or Tyr or Gln or Trp or Asp or Lys or His
  VARIANT (17)..(17): Xaa is Asp or Ser or Ile or Asn or Glu or Ala or His or Phe or Leu or Gln or Met or Gly or Tyr or Val
  VARIANT (19)..(19): Xaa is Lys or Leu or Arg or Met or Thr or Phe
  VARIANT (20)..(20): Xaa is Val or Leu or Ile or Ala or Thr
  VARIANT (21)..(21): Xaa is Leu or Ile or Val or Ala
  VARIANT (22)..(22): Xaa is Thr or Val or Cys or Glu or Ser or Ala
  VARIANT (23)..(23): Xaa is Arg or Phe or Thr or Trp or Glu or Leu or Asn or Cys or Lys or Val or Ser or Gln or Ile or Tyr or His or Ala
  VARIANT (24)..(24): Xaa is Ser or Pro or Arg or Lys or Asn or Ala or His or Gln or Gly or Leu
  VARIANT (25)..(25): Xaa is Asp or Gly or Thr or Asn or Ser or Lys or Ala or Ile or Glu or Leu or Gln or Arg or Tyr
  VARIANT (26)..(26): Xaa is Lys or Val or Ala or Glu or Tyr or Ile or Cys or Leu or Ser or Thr or Gly or Lys or Met or Asp or Phe
XXXHXXPXXXXXXXXXXNXXXXXXXXN

SEQ ID NO: 18 - protein, 27 aa, Artificial Sequence
  Synthetic peptide
  VARIANT (1)..(1): Xaa is Asp or Glu
  VARIANT (2)..(2): Xaa is Leu or Ile or Arg or Gln or Val or Met or Lys
  VARIANT (3)..(3): Xaa is Asp or Glu
  VARIANT (5)..(5): Xaa is Ile or Val or Thr or Ala or Leu
  VARIANT (6)..(6): Xaa is Val or Tyr or Ile or Leu or Phe or Trp
  VARIANT (8)..(8): Xaa is Gln or His or Arg or Lys or Tyr or Ile or Leu or Phe or Trp
  VARIANT (10)..(10): Xaa is Phe or Leu or Val or Lys or Tyr or Met or Ile or Arg or Ala or Glu or Asp or Gln
  VARIANT (11)..(11): Xaa is Leu or Arg or Thr or Ile or Val or Ser or Cys or Tyr or Lys or Phe or Gly
  VARIANT (12)..(12): Xaa is Lys or Gln or Tyr or Thr or Phe or Leu or Trp or Met or Ala or Glu or Gly or Ser
  VARIANT (16)..(16): Xaa is Ile or Leu or Phe or Ser or Arg or Tyr or Gln or Trp or Asp or Lys or His
  VARIANT (17)..(17): Xaa is Asp or Ser or Ile or Asn or Glu or Ala or His or Phe or Leu or Gln or Met or Gly or Tyr or Val
  VARIANT (22)..(22): Xaa is Thr or Val or Cys or Glu or Ser or Ala
  VARIANT (23)..(23): Xaa is Arg or Phe or Thr or Trp or Glu or Leu or Asn or Cys or Lys or Val or Ser or Gln or Ile or Tyr or His or Ala
  VARIANT (24)..(24): Xaa is Ser or Pro or Arg or Lys or Asn or Ala or His or Gln or Gly or Leu
  VARIANT (25)..(25): Xaa is Asp or Gly or Thr or Asn or Ser or Lys or Ala or Ile or Glu or Leu or Gln or Arg or Tyr
  VARIANT (26)..(26): Xaa is Lys or Val or Ala or Glu or Tyr or Ile or Cys or Leu or Ser or Thr or Gly or Lys Met or Asp or Phe
XXXHXXPXSXXXDDSXXNKVLXXXXXN

SEQ ID NO: 19 - protein, 27 aa, Artificial Sequence
  Synthetic peptide
  VARIANT (1)..(1): Xaa is Asp or Glu
  VARIANT (3)..(3): Xaa is Asp or Glu
  VARIANT (8)..(8): Xaa is Gln or His or Arg or Lys or Tyr or Ile or Leu or Trp
  VARIANT (10)..(10): Xaa is Phe or Leu or Val or Lys or Tyr or Met or Ile or Arg or Ala or Glu or Asp or Gln
  VARIANT (11)..(11): Xaa is Leu or Arg or Thr or Ile or Val or Ser or Cys or Tyr or Lys or Phe or Gly
  VARIANT (12)..(12): Xaa is Lys or Gln or Tyr or Thr or Phe or Leu or Trp or Met or Ala or Glu or Gly or Ser
  VARIANT (16)..(16): Xaa is Ile or Leu or Phe or Ser or Arg or Tyr or Gln or Trp or Asp or Lys or His
  VARIANT (17)..(17): Xaa is Asp or Ser or Ile or Asn or Glu or Ala or His or Phe or Leu or Gln or Met or Gly or Tyr or Val
  VARIANT (23)..(23): Xaa is Arg or Phe or Thr or Trp or Glu or Leu or Asn or Cys or Lys or Val or Ser or Gln or Ile or Tyr or His or Ala
  VARIANT (24)..(24): Xaa is Ser or Pro or Arg or Lys or Asn or Ala or His or Gln or Gly or Leu
  VARIANT (25)..(25): Xaa is Asp or Gly or Thr or Asn or Ser or Lys or Ala or Ile or Glu or Leu or Gln or Arg or Tyr
  VARIANT (26)..(26): Xaa is Lys or Val or Ala or Glu or Tyr or Ile or Cys or Leu or Ser or Thr or Gly or Lys or Met or Asp or Phe
XVXHIVPXSXXXDDSXXNKVLTXXXXN

SEQ ID NO: 20 - protein, 27 aa, Artificial Sequence
  Synthetic peptide
  VARIANT (2)..(2): Xaa is Ile or Val
  VARIANT (6)..(6): Xaa is Ile or Val
  VARIANT (9)..(9): Xaa is Ala or Ser
  VARIANT (11)..(11): Xaa is Ile or Leu
  VARIANT (12)..(12): Xaa is Lys or Thr
  VARIANT (14)..(14): Xaa is Asp or Asn
  VARIANT (19)..(19): Xaa is Arg or Lys or Leu
  VARIANT (22)..(22): Xaa is Thr or Val
  VARIANT (23)..(23): Xaa is Ser or Arg
  VARIANT (25)..(25): Xaa is Lys or Asp or Ala
  VARIANT (26)..(26): Xaa is Glu or Lys or Gly or Asn
DXDHIXPQXFXXDXSIDNXVLXXSXXN

SEQ ID NO: 21 - protein, 73 aa, Artificial Sequence
  Synthetic polypeptide
  VARIANT (8)..(8): Xaa is Lys or Arg
  VARIANT (12)..(12): Xaa is Val or Thr
  VARIANT (13)..(13): Xaa is Gly or Asp
  VARIANT (14)..(14): Xaa is Glu or Gln or Asp
  VARIANT (15)..(15): Xaa is Glu or Asp
  VARIANT (19)..(19): Xaa is Asp or Asn or His
  VARIANT (20)..(20): Xaa is Tyr or Arg or Asn
  VARIANT (23)..(23): Xaa is Gln or Asp or Asn
  MOD_RES (25)..(64): Any amino acid and this region may encompass 15-40 residues wherein some positions may be absent
  VARIANT (67)..(67): Xaa is Gly or Glu
  VARIANT (69)..(69): Xaa is Ser or Gly
  VARIANT (71)..(71): Xaa is Asp or Asn
LYYLQNGXDMYXXXXLDIXXLSXYXXXXXXXXXXXXXXXXXXXXXXXXXXXXXXXXXXXXXXXXNRXKXDXVP

SEQ ID NO: 22 - DNA, 4107 bp, Streptococcus pyogenes
atggataaaaagtacagcatcgggctggacatcggtacaaactcagtggggtgggccgtgattacggacgagtacaaggtaccctccaaaaaatttaaagtgctgggtaacacggacagacactctataaagaaaaatcttattggagccttgctgttcgactcaggcgagacagccgaagccacaaggttgaagcggaccgccaggaggcggtataccaggagaaagaaccgcatatgctacctgcaagaaatcttcagtaacgagatggcaaaggttgacgatagctttttccatcgcctggaagaatcctttcttgttgaggaagacaagaagcacgaacggcaccccatctttggcaatattgtcgacgaagtggcatatcacgaaaagtacccgactatctaccacctcaggaagaagctggtggactctaccgataaggcggacctcagacttatttatttggcactcgcccacatgattaaatttagaggacatttcttgatcgagggcgacctgaacccggacaacagtgacgtcgataagctgttcatccaacttgtgcagacctacaatcaactgttcgaagaaaaccctataaatgcttcaggagtcgacgctaaagcaatcctgtccgcgcgcctctcaaaatctagaagacttgagaatctgattgctcagttgcccggggaaaagaaaaatggattgtttggcaacctgatcgccctcagtctcggactgaccccaaatttcaaaagtaacttcgacctggccgaagacgctaagctccagctgtccaaggacacatacgatgacgacctcgacaatctgctggcccagattggggatcagtacgccgatctctttttggcagcaaagaacctgtccgacgccatcctgttgagcgatatcttgagagtgaacaccgaaattactaaagcaccccttagcgcatctatgatcaagcggtacgacgagcatcatcaggatctgaccctgctgaaggctcttgtgaggcaacagctccccgaaaaatacaaggaaatcttctttgaccagagcaaaaacggctacgctggctatatagatggtggggccagtcaggaggaattctataaattcatcaagcccattctcgagaaaatggacggcacagaggagttgctggtcaaacttaacagggaggacctgctgcggaagcagcggacctttgacaacgggtctatcccccaccagattcatctgggcgaactgcacgcaatcctgaggaggcaggaggatttttatccttttcttaaagataaccgcgagaaaatagaaaagattcttacattcaggatcccgtactacgtgggacctctcgcccggggcaattcacggtttgcctggatgacaaggaagtcagaggagactattacaccttggaacttcgaagaagtggtggacaagggtgcatctgcccagtctttcatcgagcggatgacaaattttgacaagaacctccctaatgagaaggtgctgcccaaacattctctgctctacgagtactttaccgtctacaatgaactgactaaagtcaagtacgtcaccgagggaatgaggaagccggcattccttagtggagaacagaagaaggcgattgtagacctgttgttcaagaccaacaggaaggtgactgtgaagcaacttaaagaagactactttaagaagatcgaatgttttgacagtgtggaaatttcaggggttgaagaccgcttcaatgcgtcattggggacttaccatgatcttctcaagatcataaaggacaaagacttcctggacaacgaagaaaatgaggatattctcgaagacatcgtcctcaccctgaccctgttcgaagacagggaaatgatagaagagcgcttgaaaacctatgcccacctcttcgacgataaagttatgaagcagctgaagcgcaggagatacacaggatggggaagattgtcaaggaagctgatcaatggaattagggataaacagagtggcaagaccatactggatttcctcaaatctgatggcttcgccaataggaacttcatgcaactgattcacgatgactctcttaccttcaaggaggacattcaaaaggctcaggtgagcgggcagggagactcccttcatgaacacatcgcgaatttggcaggttcccccgctattaaaaagggcatccttcaaactgtcaaggtggtggatgaattggtcaaggtaatgggcagacataagccagaaaatattgtgatcgagatggcccgcgaaaaccagaccacacagaagggccagaaaaatagtagagagcggatgaagaggatcgaggagggcatcaaagagctgggatctcagattctcaaagaacaccccgtagaaaacacacagctgcagaacgaaaaattgtacttgtactatctgcagaacggcagagacatgtacgtcgaccaagaacttgatattaatagactgtccgactatgacgtagaccatatcgtgccccagtccttcctgaaggacgactccattgataacaaagtcttgacaagaagcgacaagaacaggggtaaaagtgataatgtgcctagcgaggaggtggtgaaaaaaatgaagaactactggcgacagctgcttaatgcaaagctcattacacaacggaagttcgataatctgacgaaagcagagagaggtggcttgtctgagttggacaaggcagggtttattaagcggcagctggtggaaactaggcagatcacaaagcacgtggcgcagattttggacagccggatgaacacaaaatacgacgaaaatgataaactgatacgagaggtcaaagttatcacgctgaaaagcaagctggtgtccgattttcggaaagacttccagttctacaaagttcgcgagattaataactaccatcatgctcacgatgcgtacctgaacgctgttgtcgggaccgccttgataaagaagtacccaaagctggaatccgagttcgtatacggggattacaaagtgtacgatgtgaggaaaatgatagccaagtccgagcaggagattggaaaggccacagctaagtacttcttttattctaacatcatgaatttttttaagacggaaattaccctggccaacggagagatcagaaagcggccccttatagagacaaatggtgaaacaggtgaaatcgtctgggataagggcagggatttcgctactgtgaggaaggtgctgagtatgccacaggtaaatatcgtgaaaaaaaccgaagtacagaccggaggattttccaaggaaagcattttgcctaaaagaaactcagacaagctcatcgcccgcaagaaagattgggaccctaagaaatacgggggatttgactcacccaccgtagcctattctgtgctggtggtagctaaggtggaaaaaggaaagtctaagaagctgaagtccgtgaaggaactcttgggaatcactatcatggaaagatcatcctttgaaaagaaccctatcgatttcctggaggctaagggttacaaggaggtcaagaaagacctcatcattaaactgccaaaatactctctcttcgagctggaaaatggcaggaagagaatgttggccagcgccggagagctgcaaaagggaaacgagcttgctctgccctccaaatatgttaattttctctatctcgcttcccactatgaaaagctgaaagggtctcccgaagataacgagcagaagcagctgttcgtcgaacagcacaagcactatctggatgaaataatcgaacaaataagcgagttcagcaaaagggttatcctggcggatgctaatttggacaaagtactgtctgcttataacaagcaccgggataagcctattagggaacaagccgagaatataattcacctctttacactcacgaatctcggagcccccgccgccttcaaatactttgatacgactatcgaccggaaacggtataccagtaccaaagaggtcctcgatgccaccctcatccaccagtcaattactggcctgtacgaaacacggatcgacctctctcaactgggcggcgactag

SEQ ID NO: 23 - protein, 1368 aa, Streptococcus pyogenes [sequence omitted]

SEQ ID NO: 24 - DNA, 3249 bp, Neisseria meningitidis
atggccgccttcaagcccaaccccatcaactacatcctgggcctggacatcggcatcgccagcgtgggctgggccatggtggagatcgacgaggacgagaaccccatctgcctgatcgacctgggtgtgcgcgtgttcgagcgcgctgaggtgcccaagactggtgacagtctggctatggctcgccggcttgctcgctctgttcggcgccttactcgccggcgcgctcaccgccttctgcgcgctcgccgcctgctgaagcgcgagggtgtgctgcaggctgccgacttcgacgagaacggcctgatcaagagcctgcccaacactccttggcagctgcgcgctgccgctctggaccgcaagctgactcctctggagtggagcgccgtgctgctgcacctgatcaagcaccgcggctacctgagccagcgcaagaacgagggcgagaccgccgacaaggagctgggtgctctgctgaagggcgtggccgacaacgcccacgccctgcagactggtgacttccgcactcctgctgagctggccctgaacaagttcgagaaggagagcggccacatccgcaaccagcgcggcgactacagccacaccttcagccgcaaggacctgcaggccgagctgatcctgctgttcgagaagcagaaggagttcggcaacccccacgtgagcggcggcctgaaggagggcatcgagaccctgctgatgacccagcgccccgccctgagcggcgacgccgtgcagaagatgctgggccactgcaccttcgagccagccgagcccaaggccgccaagaacacctacaccgccgagcgcttcatctggctgaccaagctgaacaacctgcgcatcctggagcagggcagcgagcgccccctgaccgacaccgagcgcgccaccctgatggacgagccctaccgcaagagcaagctgacctacgcccaggcccgcaagctgctgggtctggaggacaccgccttcttcaagggcctgcgctacggcaaggacaacgccgaggccagcaccctgatggagatgaaggcctaccacgccatcagccgcgccctggagaaggagggcctgaaggacaagaagagtcctctgaacctgagccccgagctgcaggacgagatcggcaccgccttcagcctgttcaagaccgacgaggacatcaccggccgcctgaaggaccgcatccagcccgagatcctggaggccctgctgaagcacatcagcttcgacaagttcgtgcagatcagcctgaaggccctgcgccgcatcgtgcccctgatggagcagggcaagcgctacgacgaggcctgcgccgagatctacggcgaccactacggcaagaagaacaccgaggagaagatctacctgcctcctatccccgccgacgagatccgcaaccccgtggtgctgcgcgccctgagccaggcccgcaaggtgatcaacggcgtggtgcgccgctacggcagccccgcccgcatccacatcgagaccgcccgcgaggtgggcaagagcttcaaggaccgcaaggagatcgagaagcgccaggaggagaaccgcaaggaccgcgagaaggccgccgccaagttccgcgagtacttccccaacttcgtgggcgagcccaagagcaaggacatcctgaagctgcgcctgtacgagcagcagcacggcaagtgcctgtacagcggcaaggagatcaacctgggccgcctgaacgagaagggctacgtggagatcgaccacgccctgcccttcagccgcacctgggacgacagcttcaacaacaaggtgctggtgctgggcagcgagaaccagaacaagggcaaccagaccccctacgagtacttcaacggcaaggacaacagccgcgagtggcaggagttcaaggcccgcgtggagaccagccgcttcccccgcagcaagaagcagcgcatcctgctgcagaagttcgacgaggacggcttcaaggagcgcaacctgaacgacacccgctacgtgaaccgcttcctgtgccagttcgtggccgaccgcatgcgcctgaccggcaagggcaagaagcgcgtgttcgccagcaacggccagatcaccaacctgctgcgcggcttctggggcctgcgcaaggtgcgcgccgagaacgaccgccaccacgccctggacgccgtggtggtggcctgcagcaccgtggccatgcagcagaagatcacccgcttcgtgcgctacaaggagatgaacgccttcgacggtaaaaccatcgacaaggagaccggcgaggtgctgcaccagaagacccacttcccccagccctgggagttcttcgcccaggaggtgatgatccgcgtgttcggcaagcccgacggcaagcccgagttcgaggaggccgacacccccgagaagctgcgcaccctgctggccgagaagctgagcagccgccctgaggccgtgcacgagtacgtgactcctctgttcgtgagccgcgcccccaaccgcaagatgagcggtcagggtcacatggagaccgtgaagagcgccaagcgcctggacgagggcgtgagcgtgctgcgcgtgcccctgacccagctgaagctgaaggacctggagaagatggtgaaccgcgagcgcgagcccaagctgtacgaggccctgaaggcccgcctggaggcccacaaggacgaccccgccaaggccttcgccgagcccttctacaagtacgacaaggccggcaaccgcacccagcaggtgaaggccgtgcgcgtggagcaggtgcagaagaccggcgtgtgggtgcgcaaccacaacggcatcgccgacaacgccaccatggtgcgcgtggacgtgttcgagaagggcgacaagtactacctggtgcccatctacagctggcaggtggccaagggcatcctgcccgaccgcgccgtggtgcagggcaaggacgaggaggactggcagctgatcgacgacagcttcaacttcaagttcagcctgcaccccaacgacctggtggaggtgatcaccaagaaggcccgcatgttcggctacttcgccagctgccaccgcggcaccggcaacatcaacatccgcatccacgacctggaccacaagatcggcaagaacggcatcctggagggcatcggcgtgaagaccgccctgagcttccagaagtaccagatcgacgagctgggcaaggagatccgcccctgccgcctgaagaagcgccctcctgtgcgctaa

SEQ ID NO: 25 - protein, 1082 aa, Neisseria meningitidis
MAAFKPNPINYILGLDIGIASVGWAMVEIDEDENPICLIDLGVRVFERAEVPKTGDSLAMARRLARSVRRLTRRRAHRLLRARRLLKREGVLQAADFDENGLIKSLPNTPWQLRAAALDRKLTPLEWSAVLLHLIKHRGYLSQRKNEGETADKELGALLKGVADNAHALQTGDFRTPAELALNKFEKESGHIRNQRGDYSHTFSRKDLQAELILLFEKQKEFGNPHVSGGLKEGIETLLMTQRPALSGDAVQKMLGHCTFEPAEPKAAKNTYTAERFIWLTKLNNLRILEQGSERPLTDTERATLMDEPYRKSKLTYAQARKLLGLEDTAFFKGLRYGKDNAEASTLMEMKAYHAISRALEKEGLKDKKSPLNLSPELQDEIGTAFSLFKTDEDITGRLKDRIQPEILEALLKHISFDKFVQISLKALRRIVPLMEQGKRYDEACAEIYGDHYGKKNTEEKIYLPPIPADEIRNPVVLRALSQARKVINGVVRRYGSPARIHIETAREVGKSFKDRKEIEKRQEENRKDREKAAAKFREYFPNFVGEPKSKDILKLRLYEQQHGKCLYSGKEINLGRLNEKGYVEIDHALPFSRTWDDSFNNKVLVLGSENQNKGNQTPYEYFNGKDNSREWQEFKARVETSRFPRSKKQRILLQKFDEDGFKERNLNDTRYVNRFLCQFVADRMRLTGKGKKRVFASNGQITNLLRGFWGLRKVRAENDRHHALDAVVVACSTVAMQQKITRFVRYKEMNAFDGKTIDKETGEVLHQKTHFPQPWEFFAQEVMIRVFGKPDGKPEFEEADTPEKLRTLLAEKLSSRPEAVHEYVTPLFVSRAPNRKMSGQGHMETVKSAKRLDEGVSVLRVPLTQLKLKDLEKMVNREREPKLYEALKARLEAHKDDPAKAFAEPFYKYDKAGNRTQQVKAVRVEQVQKTGVWVRNHNGIADNATMVRVDVFEKGDKYYLVPIYSWQVAKGILPDRAVVQGKDEEDWQLIDDSFNFKFSLHPNDLVEVITKKARMFGYFASCHRGTGNINIRIHDLDHKIGKNGILEGIGVKTALSFQKYQIDELGKEIRPCRLKKRPPVR

SEQ ID NO: 26 - protein, 1053 aa, Staphylococcus aureus
MKRNYILGLDIGITSVGYGIIDYETRDVIDAGVRLFKEANVENNEGRRSKRGARRLKRRRRHRIQRVKKLLFDYNLLTDHSELSGINPYEARVKGLSQKLSEEEFSAALLHLAKRRGVHNVNEVEEDTGNELSTKEQISRNSKALEEKYVAELQLERLKKDGEVRGSINRFKTSDYVKEAKQLLKVQKAYHQLDQSFIDTYIDLLETRRTYYEGPGEGSPFGWKDIKEWYEMLMGHCTYFPEELRSVKYAYNADLYNALNDLNNLVITRDENEKLEYYEKFQIIENVFKQKKKPTLKQIAKEILVNEEDIKGYRVTSTGKPEFTNLKVYHDIKDITARKEIIENAELLDQIAKILTIYQSSEDIQEELTNLNSELTQEEIEQISNLKGYTGTHNLSLKAINLILDELWHTNDNQIAIFNRLKLVPKKVDLSQQKEIPTTLVDDFILSPVVKRSFIQSIKVINAIIKKYGLPNDIIIELAREKNSKDAQKMINEMQKRNRQTNERIEEIIRTTGKENAKYLIEKIKLHDMQEGKCLYSLEAIPLEDLLNNPFNYEVDHIIPRSVSFDNSFNNKVLVKQEENSKKGNRTPFQYLSSSDSKISYETFKKHILNLAKGKGRISKTKKEYLLEERDINRFSVQKDFINRNLVDTRYATRGLMNLLRSYFRVNNLDVKVKSINGGFTSFLRRKWKFKKERNKGYKHHAEDALIIANADFIFKEWKKLDKAKKVMENQMFEEKQAESMPEIETEQEYKEIFITPHQIKHIKDFKDYKYSHRVDKKPNRELINDTLYSTRKDDKGNTLIVNNLNGLYDKDNDKLKKLINKSPEKLLMYHHDPQTYQKLKLIMEQYGDEKNPLYKYYEETGNYLTKYSKKDNGPVIKKIKYYGNKLNAHLDITDDYPNSRNKVVKLSLKPYRFDVYLDNGVYKFVTVKNLDVIKKENYYEVNSKCYEEAKKLKKISNQAEFIASFYNNDLIKINGELYRVIGVNNDLLNRIEVNMIDITYREYLENMNDKRPPRIIKTIASKTQSIKKYSTDILGNLYEVKSKKHPQIIKKG

SEQ ID NO: 27 - RNA, 104 nt, Artificial Sequence
  Synthetic polynucleotide
  misc_feature (1)..(20): a, c, u, g, unknown or other
nnnnnnnnnnnnnnnnnnnnguuuuagagcuaugcugaaaagcauagcaaguuaaaauaaggcuaguccguuaucaacuugaaaaaguggcaccgagucggugc

SEQ ID NO: 28 - RNA, 106 nt, Artificial Sequence
  Synthetic polynucleotide
  misc_feature (1)..(20): a, c, u, g, unknown or other
nnnnnnnnnnnnnnnnnnnnguuuuagagcuaugcuggaaacagcauagcaaguuaaaauaaggcuaguccguuaucaacuugaaaaaguggcaccgagucggugc

SEQ ID NO: 29 - RNA, 116 nt, Artificial Sequence
  Synthetic polynucleotide
  misc_feature (1)..(20): a, c, u, g, unknown or other
nnnnnnnnnnnnnnnnnnnnguuuuagagcuaugcuguuuuggaaacaaaacagcauagcaaguuaaaauaaggcuaguccguuaucaacuugaaaaaguggcaccgagucggugc

SEQ ID NO: 30 - RNA, 96 nt, Artificial Sequence
  Synthetic oligonucleotide
  misc_feature (1)..(20): a, c, u, g, unknown or other
nnnnnnnnnnnnnnnnnnnnguauuagagcuagaaauagcaaguuaauauaaggcuaguccguuaucaacuugaaaaaguggcaccgagucggugc

SEQ ID NO: 31 - RNA, 96 nt, Artificial Sequence
  Synthetic oligonucleotide
  misc_feature (1)..(20): a, c, u, g, unknown or other
nnnnnnnnnnnnnnnnnnnnguuuaagagcuagaaauagcaaguuuaaauaaggcuaguccguuaucaacuugaaaaaguggcaccgagucggugc

SEQ ID NO: 32 - RNA, 116 nt, Artificial Sequence
  Synthetic polynucleotide
  misc_feature (1)..(20): a, c, u, g, unknown or other
nnnnnnnnnnnnnnnnnnnnguauuagagcuaugcuguauuggaaacaauacagcauagcaaguuaauauaaggcuaguccguuaucaacuugaaaaaguggcaccgagucggugc

SEQ ID NO: 33 - RNA, 47 nt, Artificial Sequence
  Synthetic oligonucleotide
aaggcuaguccguuaucaacuugaaaaaguggcaccgagucggugcu

SEQ ID NO: 34 - RNA, 49 nt, Artificial Sequence
  Synthetic oligonucleotide
aaggcuaguccguuaucaacuugaaaaaguggcaccgagucgguggugc

SEQ ID NO: 35 - RNA, 51 nt, Artificial Sequence
  Synthetic oligonucleotide
aaggcuaguccguuaucaacuugaaaaaguggcaccgagucggugcggauc

SEQ ID NO: 36 - RNA, 31 nt, Artificial Sequence
  Synthetic oligonucleotide
aaggcuaguccguuaucaacuugaaaaagug

SEQ ID NO: 37 - RNA, 18 nt, Artificial Sequence
  Synthetic oligonucleotide
aaggcuaguccguuauca

SEQ ID NO: 38 - RNA, 12 nt, Artificial Sequence
  Synthetic oligonucleotide
aaggcuaguccg

SEQ ID NO: 39 - DNA, 3159 bp, Staphylococcus aureus
atgaaaaggaactacattctggggctggacatcgggattacaagcgtggggtatgggattattgactatgaaacaagggacgtgatcgacgcaggcgtcagactgttcaaggaggccaacgtggaaaacaatgagggacggagaagcaagaggggagccaggcgcctgaaacgacggagaaggcacagaatccagagggtgaagaaactgctgttcgattacaacctgctgaccgaccattctgagctgagtggaattaatccttatgaagccagggtgaaaggcctgagtcagaagctgtcagaggaagagttttccgcagctctgctgcacctggctaagcgccgaggagtgcataacgtcaatgaggtggaagaggacaccggcaacgagctgtctacaaaggaacagatctcacgcaatagcaaagctctggaagagaagtatgtcgcagagctgcagctggaacggctgaagaaagatggcgaggtgagagggtcaattaataggttcaagacaagcgactacgtcaaagaagccaagcagctgctgaaagtgcagaaggcttaccaccagctggatcagagcttcatcgatacttatatcgacctgctggagactcggagaacctactatgagggaccaggagaagggagccccttcggatggaaagacatcaaggaatggtacgagatgctgatgggacattgcacctattttccagaagagctgagaagcgtcaagtacgcttataacgcagatctgtacaacgccctgaatgacctgaacaacctggtcatcaccagggatgaaaacgagaaactggaatactatgagaagttccagatcatcgaaaacgtgtttaagcagaagaaaaagcctacactgaaacagattgctaaggagatcctggtcaacgaagaggacatcaagggctaccgggtgacaagcactggaaaaccagagttcaccaatctgaaagtgtatcacgatattaaggacatcacagcacggaaagaaatcattgagaacgccgaactgctggatcagattgctaagatcctgactatctaccagagctccgaggacatccaggaagagctgactaacctgaacagcgagctgacccaggaagagatcgaacagattagtaatctgaaggggtacaccggaacacacaacctgtccctgaaagctatcaatctgattctggatgagctgtggcatacaaacgacaatcagattgcaatctttaaccggctgaagctggtcccaaaaaaggtggacctgagtcagcagaaagagatcccaaccacactggtggacgatttcattctgtcacccgtggtcaagcggagcttcatccagagcatcaaagtgatcaacgccatcatcaagaagtacggcctgcccaatgatatcattatcgagctggctagggagaagaacagcaaggacgcacagaagatgatcaatgagatgcagaaacgaaaccggcagaccaatgaacgcattgaagagattatccgaactaccgggaaagagaacgcaaagtacctgattgaaaaaatcaagctgcacgatatgcaggagggaaagtgtctgtattctctggaggccatccccctggaggacctgctgaacaatccattcaactacgaggtcgatcatattatccccagaagcgtgtccttcgacaattcctttaacaacaaggtgctggtcaagcaggaagagaactctaaaaagggcaataggactcctttccagtacctgtctagttcagattccaagatctcttacgaaacctttaaaaagcacattctgaatctggccaaaggaaagggccgcatcagcaagaccaaaaaggagtacctgctggaagagcgggacatcaacagattctccgtccagaaggattttattaaccggaatctggtggacacaagatacgctactcgcggcctgatgaatctgctgcgatcctatttccgggtgaacaatctggatgtgaaagtcaagtccatcaacggcgggttcacatcttttctgaggcgcaaatggaagtttaaaaaggagcgcaacaaagggtacaagcaccatgccgaagatgctctgattatcgcaaatgccgacttcatctttaaggagtggaaaaagctggacaaagccaagaaagtgatggagaaccagatgttcgaagagaagcaggccgaatctatgcccgaaatcgagacagaacaggagtacaaggagattttcatcactcctcaccagatcaagcatatcaaggatttcaaggactacaagtactctcaccgggtggataaaaagcccaacagagagctgatcaatgacaccctgtatagtacaagaaaagacgataaggggaataccctgattgtgaacaatctgaacggactgtacgacaaagataatgacaagctgaaaaagctgatcaacaaaagtcccgagaagctgctgatgtaccaccatgatcctcagacatatcagaaactgaagctgattatggagcagtacggcgacgagaagaacccactgtataagtactatgaagagactgggaactacctgaccaagtatagcaaaaaggataatggccccgtgatcaagaagatcaagtactatgggaacaagctgaatgcccatctggacatcacagacgattaccctaacagtcgcaacaaggtggtcaagctgtcactgaagccatacagattcgatgtctatctggacaacggcgtgtataaatttgtgactgtcaagaatctggatgtcatcaaaaaggagaactactatgaagtgaatagcaagtgctacgaagaggctaaaaagctgaaaaagattagcaaccaggcagagttcatcgcctccttttacaacaacgacctgattaagatcaatggcgaactgtatagggtcatcggggtgaacaatgatctgctgaaccgcattgaagtgaatatgattgacatcacttaccgagagtatctggaaaacatgaatgataagcgcccccctcgaattatcaaaacaattgcctctaagactcagagtatcaaaaagtactcaaccgacattctgggaaacctgtatgaggtgaagagcaaaaagcaccctcagattatcaaaaagggc

SEQ ID NO: 40 - RNA, 102 nt, Artificial Sequence
  Synthetic oligonucleotide
  misc_feature (1)..(20): n is a, c, g, or u
nnnnnnnnnnnnnnnnnnnnguuuuaguacucuggaaacagaaucuacuaaaacaaggcaaaaugccguguuuaucucgucaacuuguuggcgagauuuuuu

SEQ ID NO: 41 - skipped

SEQ ID NO: 42 - RNA, 42 nt, Streptococcus pyogenes
  misc_feature (1)..(20): a, c, u, g, unknown or other
nnnnnnnnnnnnnnnnnnnnguuuuagagcuaugcuguuuug

SEQ ID NO: 43 - RNA, 85 nt, Streptococcus pyogenes
ggaaccauucaaaacagcauagcaaguuaaaauaaggcuaguccguuaucaacuugaaaaaguggcaccgagucggugcuuuuuu

SEQ ID NO: 44 - RNA, 62 nt, Streptococcus pyogenes
  misc_feature (1)..(20): a, c, u, g, unknown or other
nnnnnnnnnnnnnnnnnnnnguuuuagagcuagaaauagcaaguuaaaauaaggcuaguccg

SEQ ID NO: 45 - RNA, 102 nt, Streptococcus pyogenes
  misc_feature (1)..(20): a, c, u, g, unknown or other
nnnnnnnnnnnnnnnnnnnnguuuuagagcuagaaauagcaaguuaaaauaaggcuaguccguuaucaacuugaaaaaguggcaccgagucggugcuuuuuu

SEQ ID NO: 46 - RNA, 75 nt, Streptococcus pyogenes
  misc_feature (1)..(20): a, c, u, g, unknown or other
nnnnnnnnnnnnnnnnnnnnguuuuagagcuaugcugaaaagcauagcaaguuaaaauaaggcuaguccguuauc

SEQ ID NO: 47 - RNA, 87 nt, Streptococcus pyogenes
  misc_feature (1)..(20): a, c, u, g, unknown or other
nnnnnnnnnnnnnnnnnnnnguuuuagagcuaugcuguuuuggaaacaaaacagcauagcaaguuaaaauaaggcuaguccguuauc

SEQ ID NO: 48 - RNA, 42 nt, Streptococcus thermophilus
  misc_feature (1)..(20): a, c, u, g, unknown or other
nnnnnnnnnnnnnnnnnnnnguuuuagagcuguguuguuucg

SEQ ID NO: 49 - RNA, 78 nt, Streptococcus thermophilus
gggcgaaacaacacagcgaguuaaaauaaggcuuaguccguacucaacuugaaaagguggcaccgauucgguguuuuu

SEQ ID NO: 50 - RNA, 42 nt, Streptococcus pyogenes; identical to SEQ ID NO: 42
  misc_feature (1)..(20): a, c, u, g, unknown or other

SEQ ID NO: 51 - RNA, 42 nt, Streptococcus thermophilus; identical to SEQ ID NO: 48
  misc_feature (1)..(20): a, c, u, g, unknown or other

SEQ ID NO: 52 - RNA, 85 nt, Streptococcus pyogenes
gaaccauucaaaacagcauagcaaguuaaaauaaggcuaguccguuaucaacuugaaaaaguggcaccgagucggugcuuuuuuu

SEQ ID NO: 53 - RNA, 78 nt, Streptococcus thermophilus; identical to SEQ ID NO: 49

SEQ ID NO: 54 - protein, 12 aa, Artificial Sequence
  Synthetic peptide
DIGTNSVGWAVT

SEQ ID NO: 55 - protein, 12 aa, Artificial Sequence
  Synthetic peptide
DIGTNSVGWAVT

SEQ ID NO: 56 - protein, 12 aa, Artificial Sequence
  Synthetic peptide
DVGTNSVGWAVT

SEQ ID NO: 57 - protein, 12 aa, Artificial Sequence
  Synthetic peptide
DVGTNSVGWAVT

SEQ ID NO: 58 - protein, 12 aa, Artificial Sequence
  Synthetic peptide
DMGTNSVGWAVT

SEQ ID NO: 59 - protein, 12 aa, Artificial Sequence
  Synthetic peptide
DVGTSSVGWAVT

SEQ ID NO: 60 - protein, 12 aa, Artificial Sequence
  Synthetic peptide
DIGTASVGWAVT

SEQ ID NO: 61 - protein, 12 aa, Artificial Sequence
  Synthetic peptide
DVGTGSVGWAVT

SEQ ID NO: 62 - protein, 12 aa, Artificial Sequence
  Synthetic peptide
DIGTNSVGWAVV

SEQ ID NO: 63 - protein, 12 aa, Artificial Sequence
  Synthetic peptide
DIGTNSVGWAVI

SEQ ID NO: 64 - protein, 12 aa, Artificial Sequence
  Synthetic peptide
DIGTNSVGWAVL

SEQ ID NO: 65 - protein, 12 aa, Artificial Sequence
  Synthetic peptide
DLGTNSIGWAVV

SEQ ID NO: 66 - protein, 11 aa, Artificial Sequence
  Synthetic peptide
DLGTNSIGWAI

SEQ ID NO: 67 - protein, 12 aa, Artificial Sequence
  Synthetic peptide
DLGTNSIGWALV

SEQ ID NO: 68 - protein, 12 aa, Artificial Sequence
  Synthetic peptide
DIGTNSVGWCVT

SEQ ID NO: 69 - protein, 12 aa, Artificial Sequence
  Synthetic peptide
DIGTNSVGYAVT

SEQ ID NO: 70 - protein, 12 aa, Artificial Sequence
  Synthetic peptide
DMGTGSLGWAVT

SEQ ID NO: 71 - protein, 12 aa, Artificial Sequence
  Synthetic peptide
DIGTSSVGWAAI

SEQ ID NO: 72 - protein, 12 aa, Artificial Sequence
  Synthetic peptide
DLGTGSVGWAVV

SEQ ID NO: 73 - protein, 12 aa, Artificial Sequence
  Synthetic peptide
DLGVGSVGWAIV

SEQ ID NO: 74 - protein, 12 aa, Artificial Sequence
  Synthetic peptide
DLGIASIGWAII

SEQ ID NO: 75 - protein, 12 aa, Artificial Sequence
  Synthetic peptide
DLGIASVGWAIV

SEQ ID NO: 76 - protein, 12 aa, Artificial Sequence
  Synthetic peptide
DLGVASVGWSIV

SEQ ID NO: 77 - protein, 12 aa, Artificial Sequence
  Synthetic peptide
DIGIASVGWAIL

SEQ ID NO: 78 - protein, 12 aa, Artificial Sequence
  Synthetic peptide
DLGISSVGWSVI

SEQ ID NO: 79 - protein, 12 aa, Artificial Sequence
  Synthetic peptide
DIGIASVGWSVI

SEQ ID NO: 80 - protein, 12 aa, Artificial Sequence
  Synthetic peptide
DVGIGSIGWAVI

SEQ ID NO: 81 - protein, 12 aa, Artificial Sequence
  Synthetic peptide
DLGVGSIGFAIV

SEQ ID NO: 82 - protein, 12 aa, Artificial Sequence
  Synthetic peptide
DIGYASIGWAVI

SEQ ID NO: 83 - protein, 12 aa, Artificial Sequence
  Synthetic peptide
DTGTNSLGWAIV

SEQ ID NO: 84 - protein, 12 aa, Artificial Sequence
  Synthetic peptide
DLGTNSIGWCLL

SEQ ID NO: 85 - protein, 12 aa, Artificial Sequence
  Synthetic peptide
DIGTDSLGWAVF

SEQ ID NO: 86 - protein, 12 aa, Artificial Sequence
  Synthetic peptide
DIGSNSIGFAVV

SEQ ID NO: 87 - protein, 12 aa, Artificial Sequence
  Synthetic peptide
DLGVGSIGVAVA

SEQ ID NO: 88 - protein, 12 aa, Artificial Sequence
  Synthetic peptide
DLGIASCGWGVV

SEQ ID NO: 89 - protein, 12 aa, Artificial Sequence
  Synthetic peptide
DLGIASVGWCLT

SEQ ID NO: 90 - protein, 12 aa, Artificial Sequence
  Synthetic peptide
DIGIGSVGVGIL

SEQ ID NO: 91 - protein, 12 aa, Artificial Sequence
  Synthetic peptide
DIGITSVGYGLI

SEQ ID NO: 92 - protein, 12 aa, Artificial Sequence
  Synthetic peptide
DIGITSVGFGII

SEQ ID NO: 93 - protein, 12 aa, Artificial Sequence
  Synthetic peptide
DVGITSTGYAVL

SEQ ID NO: 94 - protein, 12 aa, Artificial Sequence
  Synthetic peptide
DLGITSFGYAIL

SEQ ID NO: 95 - protein, 12 aa, Artificial Sequence
  Synthetic peptide
DIGNASVGWSAF

SEQ ID NO: 96 - protein, 12 aa, Artificial Sequence
  Synthetic peptide
DVGTNSCGWVAM

SEQ ID NO: 97 - protein, 12 aa, Artificial Sequence
  Synthetic peptide
DVGERSIGLAAV

SEQ ID NO: 98 - protein, 12 aa, Artificial Sequence
  Synthetic peptide
DVGLNSVGLAAV

SEQ ID NO: 99 - protein, 12 aa, Artificial Sequence
  Synthetic peptide
DVGLMSVGLAAI

SEQ ID NO: 100 - protein, 12 aa, Artificial Sequence
  Synthetic peptide
DVGTFSVGLAAI

SEQ ID NO: 101 - protein, 12 aa, Artificial Sequence
  Synthetic peptide
DIGTGSVGYACM

SEQ ID NO: 102 - protein, 12 aa, Artificial Sequence
  Synthetic peptide
DLGTTSIGFAHI

SEQ ID NO: 103 - protein, 12 aa, Artificial Sequence
  Synthetic peptide
DLGTNSIGSSVR

SEQ ID NO: 104 - protein, 12 aa, Artificial Sequence
  Synthetic peptide
DIGTNSVGWAVT

SEQ ID NO: 105 - protein, 12 aa, Artificial Sequence
  Synthetic peptide
DIGTNSVGWAVT

SEQ ID NO: 106 - protein, 12 aa, Artificial Sequence
  Synthetic peptide
DVGTNSVGWAVT

SEQ ID NO: 107 - protein, 12 aa, Artificial Sequence
  Synthetic peptide
DVGTNSVGWAVT

SEQ ID NO: 108 - protein, 12 aa, Artificial Sequence
  Synthetic peptide
DMGTNSVGWAVT

SEQ ID NO: 109 - protein, 12 aa, Artificial Sequence
  Synthetic peptide
DVGTSSVGWAVT

SEQ ID NO: 110 - protein, 12 aa, Artificial Sequence
  Synthetic peptide
DIGTASVGWAVT

SEQ ID NO: 111 - protein, 12 aa, Artificial Sequence
  Synthetic peptide
DVGTGSVGWAVT

SEQ ID NO: 112 - protein, 12 aa, Artificial Sequence
  Synthetic peptide
DIGTNSVGWAVV

SEQ ID NO: 113 - protein, 12 aa, Artificial Sequence
  Synthetic peptide
DIGTNSVGWAVI

SEQ ID NO: 114 - protein, 12 aa, Artificial Sequence
  Synthetic peptide
DIGTNSIGWAVI

SEQ ID NO: 115 - protein, 12 aa, Artificial Sequence
  Synthetic peptide
DIGTNSVGWAVL

SEQ ID NO: 116 - protein, 12 aa, Artificial Sequence
  Synthetic peptide
DLGTNSIGWAVV

SEQ ID NO: 117 - protein, 11 aa, Artificial Sequence
  Synthetic peptide
DLGTNSIGWAI

SEQ ID NO: 118 - protein, 12 aa, Artificial Sequence
  Synthetic peptide
DLGTNSIGWALV

SEQ ID NO: 119 - protein, 12 aa, Artificial Sequence
  Synthetic peptide
DIGTNSVGWCVT

SEQ ID NO: 120 - protein, 12 aa, Artificial Sequence
  Synthetic peptide
DIGTNSVGYAVT

SEQ ID NO: 121 - protein, 12 aa, Artificial Sequence
  Synthetic peptide
DMGTGSLGWAVT

SEQ ID NO: 122 - protein, 12 aa, Artificial Sequence
  Synthetic peptide
DIGTSSVGWAAI

SEQ ID NO: 123 - protein, 12 aa, Artificial Sequence
  Synthetic peptide
DLGTGSVGWAVV

SEQ ID NO: 124 - protein, 12 aa, Artificial Sequence
  Synthetic peptide
DLGVGSVGWAIV

SEQ ID NO: 125 - protein, 12 aa, Artificial Sequence
  Synthetic peptide
DLGIASIGWAII

SEQ ID NO: 126 - protein, 12 aa, Artificial Sequence
  Synthetic peptide
DLGIASVGWAIV

SEQ ID NO: 127 - protein, 12 aa, Artificial Sequence
  Synthetic peptide
DLGIASVGWAVV

SEQ ID NO: 128 - protein, 12 aa, Artificial Sequence
  Synthetic peptide
DLGVASVGWSIV

SEQ ID NO: 129 - protein, 12 aa, Artificial Sequence
  Synthetic peptide
DIGIASVGWAIL

SEQ ID NO: 130 - protein, 12 aa, Artificial Sequence
  Synthetic peptide
DIGIASVGWAVL

SEQ ID NO: 131 - protein, 12 aa, Artificial Sequence
  Synthetic peptide
DIGIASIGWAVI

SEQ ID NO: 132 - protein, 12 aa, Artificial Sequence
  Synthetic peptide
DIGIASVGWAII

SEQ ID NO: 133 - protein, 12 aa, Artificial Sequence
  Synthetic peptide
DVGIASVGWAVI

SEQ ID NO: 134 - protein, 11 aa, Artificial Sequence
  Synthetic peptide
DIGIASVGWAL

SEQ ID NO: 135 - protein, 12 aa, Artificial Sequence
  Synthetic peptide
DIGIASVGWAMV

SEQ ID NO: 136 - protein, 12 aa, Artificial Sequence
  Synthetic peptide
DIGIASVGWSVI

SEQ ID NO: 137 - protein, 12 aa, Artificial Sequence
  Synthetic peptide
DLGISSVGWSVI

SEQ ID NO: 138 - protein, 12 aa, Artificial Sequence
  Synthetic peptide
DIGITSVGWAVI

SEQ ID NO: 139 - protein, 12 aa, Artificial Sequence
  Synthetic peptide
DVGIGSIGWAVI

SEQ ID NO: 140 - protein, 12 aa, Artificial Sequence
  Synthetic peptide
DLGISSLGWAIV

SEQ ID NO: 141 - protein, 12 aa, Artificial Sequence
  Synthetic peptide
DLGVGSIGFAIV

SEQ ID NO: 142 - protein, 12 aa, Artificial Sequence
  Synthetic peptide
DIGYASIGWAVI

SEQ ID NO: 143 - protein, 12 aa, Artificial Sequence
  Synthetic peptide
DLGTNSIGWCLL

SEQ ID NO: 144 - protein, 12 aa, Artificial Sequence
  Synthetic peptide
DLGTNSIGWGLL

SEQ ID NO: 145 - protein, 12 aa, Artificial Sequence
  Synthetic peptide
DTGTNSLGWAIV

SEQ ID NO: 146 - protein, 12 aa, Artificial Sequence
  Synthetic peptide
DIGTDSLGWAVF

SEQ ID NO: 147 - protein, 12 aa, Artificial Sequence
  Synthetic peptide
DLGSTSLGWAIF

SEQ ID NO: 148 - protein, 12 aa, Artificial Sequence
  Synthetic peptide
DIGISSIGWAFS

SEQ ID NO: 149 - protein, 12 aa, Artificial Sequence
  Synthetic peptide
DLGIASVGWCLT

SEQ ID NO: 150 - protein, 12 aa, Artificial Sequence
  Synthetic peptide
DLGIASCGWGVV

SEQ ID NO: 151 - protein, 12 aa, Artificial Sequence
  Synthetic peptide
DIGSNSIGFAVV

SEQ ID NO: 152 - protein, 12 aa, Artificial Sequence
  Synthetic peptide
DIGTTSIGFSVI

SEQ ID NO: 153 - protein, 12 aa, Artificial Sequence
  Synthetic peptide
DIGITSVGYGLI

SEQ ID NO: 154 - protein, 12 aa, Artificial Sequence
  Synthetic peptide
DIGITSVGFGII

SEQ ID NO: 155 - protein, 12 aa, Artificial Sequence
  Synthetic peptide
DLGTTSIGFAHI

SEQ ID NO: 156 - protein, 12 aa, Artificial Sequence
  Synthetic peptide
DIGIGSVGVGIL

SEQ ID NO: 157 - protein, 12 aa, Artificial Sequence
  Synthetic peptide
DLGVGSIGVAVA

SEQ ID NO: 158 - protein, 12 aa, Artificial Sequence
  Synthetic peptide
DVGITSTGYAVL

SEQ ID NO: 159 - protein, 12 aa, Artificial Sequence
  Synthetic peptide
DLGITSFGYAIL

SEQ ID NO: 160 - protein, 12 aa, Artificial Sequence
  Synthetic peptide
DIGTSSIGWWLY

SEQ ID NO: 161 - protein, 12 aa, Artificial Sequence
  Synthetic peptide
DLGSNSLGWFVT

SEQ ID NO: 162 - protein, 12 aa, Artificial Sequence
  Synthetic peptide
DLGANSLGWFVV

SEQ ID NO: 163 - protein, 12 aa, Artificial Sequence
  Synthetic peptide
DIGNASVGWSAF

SEQ ID NO: 164 - protein, 12 aa, Artificial Sequence
  Synthetic peptide
DVGTNSCGWVAM

SEQ ID NO: 165 - protein, 12 aa, Artificial Sequence
  Synthetic peptide
DVGERSIGLAAV

SEQ ID NO: 166 - protein, 12 aa, Artificial Sequence
  Synthetic peptide
DVGLNSVGLAAV

SEQ ID NO: 167 - protein, 12 aa, Artificial Sequence
  Synthetic peptide
DVGLMSVGLAAI

SEQ ID NO: 168 - protein, 12 aa, Artificial Sequence
  Synthetic peptide
DVGTFSVGLAAI

SEQ ID NO: 169 - protein, 12 aa, Artificial Sequence
  Synthetic peptide
DIGTGSVGYACM

SEQ ID NO: 170 - protein, 12 aa, Artificial Sequence
  Synthetic peptide
DLGTNSIGSSVR

SEQ ID NO: 171 - protein, 15 aa, Artificial Sequence
  Synthetic peptide
DIGLRIGITSCGWSI

SEQ ID NO: 172 - protein, 12 aa, Artificial Sequence
  Synthetic peptide
DMGAKYTGVFYA

SEQ ID NO: 173 - protein, 12 aa, Artificial Sequence
  Synthetic peptide
DLGGKNTGFFSF

SEQ ID NO: 174 - protein, 12 aa, Artificial Sequence
  Synthetic peptide
DLGVKNTGVFSA

SEQ ID NO: 175 - protein, 12 aa, Artificial Sequence
  Synthetic peptide
DLGAKFTGVALY

SEQ ID NO: 176 - protein, 12 aa, Artificial Sequence
  Synthetic peptide
DLGGKFTGVCLS

SEQ ID NO: 177 - protein, 12 aa, Artificial Sequence
  Synthetic peptide
DLGGTYTGTFIT

SEQ ID NO: 178 - protein, 28 aa, Artificial Sequence
  Synthetic peptide
YDIDHIYPRSLTKDDSFDNLVLCERTAN

SEQ ID NO: 179 - protein, 28 aa, Artificial Sequence
  Synthetic peptide
DIDHIYPRSKVIKDDSFDNLVLVLKNEN

SEQ ID NO: 180 - protein, 27 aa, Artificial Sequence
  Synthetic peptide
DRDHIYPQSKIKDDSIDNLVLVNKTYN

SEQ ID NO: 181 - protein, 27 aa, Artificial Sequence
  Synthetic peptide
DIDHIYPRSKIKDDSITNRVLVEKDIN

SEQ ID NO: 182 - protein, 27 aa, Artificial Sequence
  Synthetic peptide
DIDHIYPQSKIKDDSISNRVLVCSSCN

SEQ ID NO: 183 - protein, 27 aa, Artificial Sequence
  Synthetic peptide
DIDHIYPQSKTMDDSLNNRVLVKKNYN

SEQ ID NO: 184 - protein, 27 aa, Artificial Sequence
  Synthetic peptide
DQDHIYPKSKIYDDSLENRVLVKKNLN

SEQ ID NO: 185 - protein, 27 aa, Artificial Sequence
  Synthetic peptide
QIDHIVPQSLVKDDSFDNRVLVVPSEN

SEQ ID NO: 186 - protein, 27 aa, Artificial Sequence
  Synthetic peptide
DIDHIIPQAFIKDNSIDNRVLTSSKEN

SEQ ID NO: 187 - protein, 27 aa, Artificial Sequence
  Synthetic peptide
DIDHIIPQAFLKDNSIDNKVLVSSASN

SEQ ID NO: 188 - protein, 27 aa, Artificial Sequence
  Synthetic peptide
DIDHIIPQAYTKDNSLDNRVLVSNITN

SEQ ID NO: 189 - protein, 27 aa, Artificial Sequence
  Synthetic peptide
DIDHIVPQSFITDNSIDNLVLTSSAGN

SEQ ID NO: 190 - protein, 27 aa, Artificial Sequence
  Synthetic peptide
DVDHIVPQSFLKDDSIDNKVLTRSDKN

SEQ ID NO: 191 - protein, 27 aa, Artificial Sequence
  Synthetic peptide
NIDHIYPQSMVKDDSLDNKVLVQSEIN

SEQ ID NO: 192 - protein, 27 aa, Artificial Sequence
  Synthetic peptide
DIDHILPQSLIKDDSLDNRVLVNATIN

SEQ ID NO: 193 - protein, 27 aa, Artificial Sequence
  Synthetic peptide
DIDHILPQSFIKDDSLENRVLVKKAVN

SEQ ID NO: 194 - protein, 27 aa, Artificial Sequence
  Synthetic peptide
EVDHIFPRSFIKDDSIDNKVLVIKKMN

SEQ ID NO: 195 - protein, 27 aa, Artificial Sequence
  Synthetic peptide
EVDHIIPRSYIKDDSFENKVLVYREEN

SEQ ID NO: 196 - protein, 27 aa, Artificial Sequence
  Synthetic peptide
DIDHIIPQAVTQNDSIDNRVLVARAEN

SEQ ID NO: 197 - protein, 27 aa, Artificial Sequence
  Synthetic peptide
EIDHIIPYSISFDDSSSNKLLVLAESN

SEQ ID NO: 198 - protein, 27 aa, Artificial Sequence
  Synthetic peptide
EIDHIIPYSLCFDDSSANKVLVHKQSN

SEQ ID NO: 199 - protein, 27 aa, Artificial Sequence
  Synthetic peptide
DIDHIIPYSRSMDDSYSNKVLVLSGEN

SEQ ID NO: 200 - protein, 27 aa, Artificial Sequence
  Synthetic peptide
DIDHIIPYSKSMDDSFNNKVLCLAEEN

SEQ ID NO: 201 - protein, 27 aa, Artificial Sequence
  Synthetic peptide
EIDHIYPYSRSFDDSYMNKVLVFTKQN

SEQ ID NO: 202 - protein, 27 aa, Artificial Sequence
  Synthetic peptide
QIDHIYPYSRSMDDSYMNKVLVLTDEN

SEQ ID NO: 203 - protein, 27 aa, Artificial Sequence
  Synthetic peptide
EIDHIIPFSRSFDDSLSNKILVLGSEN

SEQ ID NO: 204 - protein, 27 aa, Artificial Sequence
  Synthetic peptide
EIDHALPFSRTWDDSFNNKVLVLGSEN

SEQ ID NO: 205 - protein, 27 aa, Artificial Sequence
  Synthetic peptide
EIDHALPFSRTWDDSFNNKVLVLASEN

SEQ ID NO: 206 - protein, 27 aa, Artificial Sequence
  Synthetic peptide
EIDHIIPISISLDDSINNKVLVLSKAN

SEQ ID NO: 207 - protein, 27 aa, Artificial Sequence
  Synthetic peptide
EVDHIIPISISLDDSITNKVLVTHREN

SEQ ID NO: 208 - protein, 27 aa, Artificial Sequence
  Synthetic peptide
QVDHALPYSRSYDDSKNNKVLVLTHEN

SEQ ID NO: 209 - protein, 27 aa, Artificial Sequence
  Synthetic peptide
EVDHILPLSITFDDSLANKVLVYATAN

SEQ ID NO: 210 - protein, 27 aa, Artificial Sequence
  Synthetic peptide
EIDHIIPRSISFDDARSNKVLVYRSEN

SEQ ID NO: 211 - protein, 27 aa, Artificial Sequence
  Synthetic peptide
EVDHIIPRSVSFDNSYHNKVLVKQSEN

SEQ ID NO: 212 - protein, 27 aa, Artificial Sequence
  Synthetic peptide
DIDHILPYSITFDDSFRNKVLVTSQEN

SEQ ID NO: 213 - protein, 27 aa, Artificial Sequence
  Synthetic peptide
EIDHILPRSRSADDSFANKVLCLARAN

SEQ ID NO: 214 - protein, 27 aa, Artificial Sequence
  Synthetic peptide
EIEHLLPFSLTLDDSMANKTVCFRQAN

SEQ ID NO: 215 - protein, 27 aa, Artificial Sequence
  Synthetic peptide
DIDHILPFSVSLDDSAANKVVCLREAN

SEQ ID NO: 216 - protein, 27 aa, Artificial Sequence
  Synthetic peptide
DIDHLIPFSISWDDSAANKVVCMRYAN

SEQ ID NO: 217 - protein, 27 aa, Artificial Sequence
  Synthetic peptide
DIDHILPVAMTLDDSPANKIICMRYAN

SEQ ID NO: 218 - protein, 27 aa, Artificial Sequence
  Synthetic peptide
DVDHILPYSRTLDDSFPNRTLCLREAN

SEQ ID NO: 219 - protein, 27 aa, Artificial Sequence
  Synthetic peptide
EIEHILPFSRTLDDSLNNRTVAMRRAN

SEQ ID NO: 220 - protein, 27 aa, Artificial Sequence
  Synthetic peptide
EVDHIIPYSISWDDSYTNKVLTSAKCN

SEQ ID NO: 221 - protein, 27 aa, Artificial Sequence
  Synthetic peptide
QVDHILPWSRFGDDSYLNKTLCTARSN

SEQ ID NO: 222 - protein, 27 aa, Artificial Sequence
  Synthetic peptide
QVDHILPFSKTLDDSFANKVLAQHDAN

SEQ ID NO: 223 - protein, 27 aa, Artificial Sequence
  Synthetic peptide
QIDHAFPLSRSLDDSQSNKVLCLTSSN

SEQ ID NO: 224 - protein, 27 aa, Artificial Sequence
  Synthetic peptide
DIDHIVPRSISFDDSFSNLVIVNKLDN

SEQ ID NO: 225 - protein, 27 aa, Artificial Sequence
  Synthetic peptide
EIEHIIPYSMSYDNSQANKILTEKAEN

SEQ ID NO: 226 - protein, 27 aa, Artificial Sequence
  Synthetic peptide
EIDHVIPYSKSADDSWFNKLLVKKSTN

SEQ ID NO: 227 - protein, 27 aa, Artificial Sequence
  Synthetic peptide
EMDHILPYSRSLDNGWHNRVLVHGKDN

SEQ ID NO: 228 - protein, 27 aa, Artificial Sequence
  Synthetic peptide
EVDHIVPYSLILDNTINNKALVYAEEN

SEQ ID NO: 229 - protein, 27 aa, Artificial Sequence
  Synthetic peptide
EIEHVIPQSLYFDDSFSNKVICEAEVN

SEQ ID NO: 230 - protein, 27 aa, Artificial Sequence
  Synthetic peptide
DIEHIIPQARLFDDSFSNKTLEARSVN

SEQ ID NO: 231 - protein, 27 aa, Artificial Sequence
  Synthetic peptide
EIEHIVPKARVFDDSFSNKTLTFHRIN

SEQ ID NO: 232 - protein, 28 aa, Artificial Sequence
  Synthetic peptide
DKDHIIPQSMKKDDSIINNLVLVNKNAN

SEQ ID NO: 233 - protein, 27 aa, Artificial Sequence
  Synthetic peptide
EVEHIWPRSRSFDNSPRNKTLCRKDVN

SEQ ID NO: 234 - protein, 27 aa, Artificial Sequence
  Synthetic peptide
IVNHIIPYNRSFDDTYHNRVLTLTETK

SEQ ID NO: 235 - protein, 27 aa, Artificial Sequence
  Synthetic peptide
DMEHTIPKSISFDNSDQNLTLCESYYN

SEQ ID NO: 236 - protein, 27 aa, Artificial Sequence
  Synthetic peptide
DIEHTIPRSAGGDSTKMNLTLCSSRFN

SEQ ID NO: 237 - protein, 27 aa, Artificial Sequence
  Synthetic peptide
DIEHTIPRSISQDNSQMNKTLCSLKFN

SEQ ID NO: 238 - protein, 27 aa, Artificial Sequence
  Synthetic peptide
DIDHVIPLARGGRDSLDNMVLCQSDAN

SEQ ID NO: 239 - protein, 27 aa, Artificial Sequence
  Synthetic peptide
DIEHLFPIAESEDNGRNNLVISHSACN

SEQ ID NO: 240 - protein, 27 aa, Artificial Sequence
  Synthetic peptide
DVDHIFPRDDTADNSYGNKVVAHRQCN

SEQ ID NO: 241 - protein, 27 aa, Artificial Sequence
  Synthetic peptide
DIEHIVPQSLGGLSTDYNTIVTLKSVN

SEQ ID NO: 242 - protein, 27 aa, Artificial Sequence
  Synthetic peptide
ELDHIVPRTDGGSNRHENLAITCGACN

SEQ ID NO: 243 - protein, 28 aa, Artificial Sequence
  Synthetic peptide
EMDHIVPRKGVGSTNTRTNFAAVCAECN

SEQ ID NO: 244 - protein, 28 aa, Artificial Sequence
  Synthetic peptide
EMDHIVPRKGVGSTNTRVNLAAACAACN

SEQ ID NO: 245 - protein, 28 aa, Artificial Sequence
  Synthetic peptide
EMDHIVPRAGQGSTNTRENLVAVCHRCN

SEQ ID NO: 246 - protein, 33 aa, Artificial Sequence
  Synthetic polypeptide
EIDHILPRSLIKDARGIVFNAEPNLIYASSRGN

SEQ ID NO: 247 - protein, 33 aa, Artificial Sequence
  Synthetic polypeptide
EIDHIIPRSLTGRTKKTVFNSEANLIYCSSKGN

SEQ ID NO: 248 - protein, 33 aa, Artificial Sequence
  Synthetic polypeptide
EIDHIIPRSLTLKKSESIYNSEVNLIFVSAQGN

SEQ ID NO: 249 - protein, 33 aa, Artificial Sequence
  Synthetic polypeptide
EIDHIYPRSLSKKHFGVIFNSEVNLIYCSSQGN

SEQ ID NO: 250 - protein, 33 aa, Artificial Sequence
  Synthetic polypeptide
EIDHILPRSHTLKIYGTVFNPEGNLIYVHQKCN

SEQ ID NO: 251 - protein, 30 aa, Artificial Sequence
  Synthetic polypeptide
ELDHIIPRSHKKYGTLNDEANLICVTRGDN

SEQ ID NO: 252 - protein, 27 aa, Artificial Sequence
  Synthetic peptide
ELEHIVPHSFRQSNALSSLVLTWPGVN

SEQ ID NO: 253 - protein, 28 aa, Artificial Sequence
  Synthetic peptide
YDIDHIYPRSLTKDDSFDNLVLCERTAN

SEQ ID NO: 254 - protein, 28 aa, Artificial Sequence
  Synthetic peptide
DIDHIYPRSKVIKDDSFDNLVLVLKNEN

SEQ ID NO: 255 - protein, 27 aa, Artificial Sequence
  Synthetic peptide
DRDHIYPQSKIKDDSIDNLVLVNKTYN

SEQ ID NO: 256 - protein, 27 aa, Artificial Sequence
  Synthetic peptide
DIDHIYPRSKIKDDSITNRVLVEKDIN

SEQ ID NO: 257 - protein, 27 aa, Artificial Sequence
  Synthetic peptide
DIDHIYPQSKIKDDSISNRVLVCSSCN

SEQ ID NO: 258 - protein, 27 aa, Artificial Sequence
  Synthetic peptide
DIDHIYPQSKTMDDSLNNRVLVKKNYN

SEQ ID NO: 259 - protein, 27 aa, Artificial Sequence
  Synthetic peptide
DQDHIYPKSKIYDDSLENRVLVKKNLN

SEQ ID NO: 260 - protein, 27 aa, Artificial Sequence
  Synthetic peptide
QIDHIVPQSLVKDDSFDNRVLVVPSEN

SEQ ID NO: 261 - protein, 27 aa, Artificial Sequence
  Synthetic peptide
DIDHIIPQAFIKDNSIDNRVLTSSKEN

SEQ ID NO: 262 - protein, 27 aa, Artificial Sequence
  Synthetic peptide
DIDHIIPQAFLKDNSIDNKVLVSSASN

SEQ ID NO: 263 - protein, 27 aa, Artificial Sequence
  Synthetic peptide
DIDHIIPQAYTKDNSLDNRVLVSNITN

SEQ ID NO: 264 - protein, 27 aa, Artificial Sequence
  Synthetic peptide
DIDHIVPQSFITDNSIDNLVLTSSAGN

SEQ ID NO: 265 - protein, 27 aa, Artificial Sequence
  Synthetic peptide
DVDHIVPQSFLKDDSIDNKVLTRSDKN

SEQ ID NO: 266 - protein, 27 aa, Artificial Sequence
  Synthetic peptide
NIDHIYPQSMVKDDSLDNKVLVQSEIN

SEQ ID NO: 267 - protein, 27 aa, Artificial Sequence
  Synthetic peptide
DIDHILPQSLIKDDSLDNRVLVNATIN

SEQ ID NO: 268 - protein, 27 aa, Artificial Sequence
  Synthetic peptide
DIDHILPQSFIKDDSLENRVLVKKAVN

SEQ ID NO: 269 - protein, 27 aa, Artificial Sequence
  Synthetic peptide
EVDHIFPRSFIKDDSIDNKVLVIKKMN

SEQ ID NO: 270 - protein, 27 aa, Artificial Sequence
  Synthetic peptide
EVDHIIPRSYIKDDSFENKVLVYREEN

SEQ ID NO: 271 - protein, 27 aa, Artificial Sequence
  Synthetic peptide
DIDHIIPQAVTQNDSIDNRVLVARAEN

SEQ ID NO: 272 - protein, 27 aa, Artificial Sequence
  Synthetic peptide
DIDHIVPRSISFDDSFSNLVIVNKLDN

SEQ ID NO: 273 - protein, 27 aa, Artificial Sequence
  Synthetic peptide
EIDHIIPYSISFDDSSSNKLLVLAESN

SEQ ID NO: 274 - protein, 27 aa, Artificial Sequence
  Synthetic peptide
EIDHIIPYSLCFDDSSANKVLVHKQSN

SEQ ID NO: 275 - protein, 27 aa, Artificial Sequence
  Synthetic peptide
EIDHIIPISISLDDSINNKVLVLSKAN

SEQ ID NO: 276 - protein, 27 aa, Artificial Sequence
  Synthetic peptide
EVDHIIPISISLDDSITNKVLVTHREN

SEQ ID NO: 277 - protein, 27 aa, Artificial Sequence
  Synthetic peptide
EVDHILPLSITFDDSLANKVLVYATAN

SEQ ID NO: 278 - protein, 27 aa, Artificial Sequence
  Synthetic peptide
EIDHIIPRSISFDDARSNKVLVYRSEN

SEQ ID NO: 279 - protein, 27 aa, Artificial Sequence
  Synthetic peptide
EVDHIIPRSVSFDNSYHNKVLVKQSEN

SEQ ID NO: 280 - protein, 27 aa, Artificial Sequence
  Synthetic peptide
EVDHIIPYSISWDDSYTNKVLTSAKCN

SEQ ID NO: 281 - protein, 27 aa, Artificial Sequence
  Synthetic peptide
DIDHIIPYSRSMDDSYSNKVLVLSGEN

SEQ ID NO: 282 - protein, 27 aa, Artificial Sequence
  Synthetic peptide
EIEHIIPYSMSYDNSQANKILTEKAEN

SEQ ID NO: 283 - protein, 27 aa, Artificial Sequence
  Synthetic peptide
EVDHIVPYSLILDNTINNKALVYAEEN

SEQ ID NO: 284 - protein, 27 aa, Artificial Sequence
  Synthetic peptide
EIDHVIPYSKSADDSWFNKLLVKKSTN

SEQ ID NO: 285 - protein, 27 aa, Artificial Sequence
  Synthetic peptide
EMDHILPYSRSLDNGWHNRVLVHGKDN

SEQ ID NO: 286 - protein, 27 aa, Artificial Sequence
  Synthetic peptide
EIEHVIPQSLYFDDSFSNKVICEAEVN

SEQ ID NO: 287 - protein, 27 aa, Artificial Sequence
  Synthetic peptide
DIEHIIPQARLFDDSFSNKTLEARSVN

SEQ ID NO: 288 - protein, 27 aa, Artificial Sequence
  Synthetic peptide
EIEHIVPKARVFDDSFSNKTLTFHRIN

SEQ ID NO: 289 - protein, 28 aa, Artificial Sequence
  Synthetic peptide
DKDHIIPQSMKKDDSIINNLVLVNKNAN

SEQ ID NO: 290 - protein, 27 aa, Artificial Sequence
  Synthetic peptide
QVDHILPWSRFGDDSYLNKTLCTARSN

SEQ ID NO: 291 - protein, 27 aa, Artificial Sequence
  Synthetic peptide
DIDHVIPLARGGRDSLDNMVLCQSDAN

SEQ ID NO: 292 - protein, 27 aa, Artificial Sequence
  Synthetic peptide
DMEHTIPKSISFDNSDQNLTLCESYYN

SEQ ID NO: 293 - protein, 27 aa, Artificial Sequence
  Synthetic peptide
DIEHTIPRSAGGDSTKMNLTLCSSRFN

SEQ ID NO: 294 - protein, 27 aa, Artificial Sequence
  Synthetic peptide
DIEHTIPRSISQDNSQMNKTLCSLKFN

SEQ ID NO: 295 - protein, 27 aa, Artificial Sequence
  Synthetic peptide
DIEHLFPIAESEDNGRNNLVISHSACN

SEQ ID NO: 296 - protein, 27 aa, Artificial Sequence
  Synthetic peptide
DVDHIFPRDDTADNSYGNKVVAHRQCN

SEQ ID NO: 297 - protein, 27 aa, Artificial Sequence
  Synthetic peptide
DIEHIVPQSLGGLSTDYNTIVTLKSVN

SEQ ID NO: 298 - protein, 27 aa, Artificial Sequence
  Synthetic peptide
ELDHIVPRTDGGSNRHENLAITCGACN

SEQ ID NO: 299 - protein, 28 aa, Artificial Sequence
  Synthetic peptide
EMDHIVPRKGVGSTNTRTNFAAVCAECN

SEQ ID NO: 300 - protein, 28 aa, Artificial Sequence
  Synthetic peptide
EMDHIVPRKGVGSTNTRVNLAAACAACN

SEQ ID NO: 301 - protein, 28 aa, Artificial Sequence
  Synthetic peptide
EMDHIVPRAGQGSTNTRENLVAVCHRCN

SEQ ID NO: 302 - protein, 27 aa, Artificial Sequence
  Synthetic peptide
ELEHIVPHSFRQSNALSSLVLTWPGVN

SEQ ID NO: 303 - DNA, 3333 bp, Artificial Sequence
  Synthetic polynucleotide
atggtgcctaagaagaagagaaaggtggctgccttcaaacctaattcaatcaactacatcctcggcctcgatatcggcatcgcatccgtcggctgggcgatggtagaaattgacgaagaagaaaaccccatccgcctgattgatttgggcgtgcgcgtatttgagcgtgccgaagtaccgaaaacaggcgactcccttgccatggcaaggcgtttggcgcgcagtgttcgccgcctgacccgccgtcgcgcccaccgcctgcttcggacccgccgcctattgaaacgcgaaggcgtattacaagccgccaattttgacgaaaacggcttgattaaatccttaccgaatacaccatggcaacttcgcgcagccgcattagaccgcaaactgacgcctttagagtggtcggcagtcttgttgcatttaatcaaacatcgcggctatttatcgcaacggaaaaacgagggcgaaactgccgataaggagcttggcgctttgcttaaaggcgtagccggcaatgcccatgccttacagacaggcgatttccgcacaccggccgaattggctttaaataaatttgagaaagaaagcggccatatccgcaatcagcgcagcgattattcgcatacgttcagccgcaaagatttacaggcggagctgattttgctgtttgaaaaacaaaaagaatttggcaatccgcatgtttcaggcggccttaaagaaggtattgaaaccctactgatgacgcaacgccctgccctgtccggcgatgccgttcaaaaaatgttggggcattgcaccttcgaaccggcagagccgaaagccgctaaaaacacctacacagccgaacgtttcatctggctgaccaagctgaacaacctgcgtattttagagcaaggcagcgagcggccattgaccgataccgaacgcgccacgcttatggacgagccatacagaaaatccaaactgacttacgcacaagcccgtaagctgctgggtttagaagataccgcctttttcaaaggcttgcgctatggtaaagacaatgccgaagcctcaacattgatggaaatgaaggcctaccatgccatcagccgtgcactggaaaaagaaggattgaaagacaaaaaatccccattaaacctttctcccgaattacaagacgaaatcggcacggcattctccctgttcaaaaccgatgaagacattacaggccgtctgaaagaccgtatacagcccgaaatcttagaagcgctgttgaaacacatcagcttcgataagttcgtccaaatttccttgaaagcattgcgccgaattgtgcctctaatggaacaaggcaaacgttacgatgaagcctgcgccgaaatctacggagaccattacggcaagaagaatacggaagaaaagatttatctgccgccgattcccgccgacgaaatccgcaaccccgtcgtcttgcgcgccttatctcaagcacgtaaggtcattaacggcgtggtacgccgttacggctccccagctcgtatccatattgaaactgcaagggaagtaggtaaatcgtttaaagaccgcaaagaaattgagaaacgccaagaagaaaaccgcaaagaccgggaaaaagccgccgccaaattccgagagtatttccccaattttgtcggagaacccaaatccaaagatattctgaaactgcgcctgtacgagcaacaacacggcaaatgcctgtattcgggcaaagaaatcaacttaggccgtctgaacgaaaaaggctatgtcgaaatcgaccatgccctgccgttctcgcgcacatgggacgacagtttcaacaataaagtactggtattgggcagcgaaaaccaaaacaaaggcaatcaaaccccttacgaatacttcaacggcaaagacaacagccgcgaatggcaggaatttaaagcgcgtgtcgaaaccagccgtttcccgcgcagtaaaaaacaacggattctgctgcaaaaattcgatgaagacggctttaaagaacgcaatctgaacgacacgcgctacgtcaaccgtttcctgtgtcaatttgttgccgaccgtatgcggctgacaggtaaaggcaagaaacgtgtctttgcatccaacggacaaattaccaatctgttgcgcggcttttggggattgcgcaaagtgcgtgcggaaaacgaccgccatcacgccttggacgccgtcgtcgttgcctgctcgaccgttgccatgcagcagaaaattacccgttttgtacgctataaagagatgaacgcgtttgacggtaaaaccatagacaaagaaacaggagaagtgctgcatcaaaaaacacacttcccacaaccttgggaatttttcgcacaagaagtcatgattcgcgtcttcggcaaaccggacggcaaacccgaattcgaagaagccgataccctagaaaaactgcgcacgttgcttgccgaaaaattatcatctcgccccgaagccgtacacgaatacgttacgccactgtttgtttcacgcgcgcccaatcggaagatgagcgggcaagggcatatggagaccgtcaaatccgccaaacgactggacgaaggcgtcagcgtgttgcgcgtaccgctgacacagttaaaactgaaagacttggaaaaaatggtcaatcgggagcgcgaacctaagctatacgaagcactgaaagcacggctggaagcacataaagacgatcctgccaaagcctttgccgagccgttttacaaatacgataaagcaggcaaccgcacccaacaggtaaaagccgtacgcgtagagcaagtacagaaaaccggcgtatgggtgcgcaaccataacggtattgccgacaacgcaaccatggtgcgcgtagatgtgtttgagaaaggcgacaagtattatctggtaccgatttacagttggcaggtagcgaaagggattttgccggatagggctgttgtacaaggaaaagatgaagaagattggcaacttattgatgatagtttcaactttaaattctcattacaccctaatgatttagtcgaggttataacaaaaaaagctagaatgtttggttactttgccagctgccatcgaggcacaggtaatatcaatatacgcattcatgatcttgatcataaaattggcaaaaatggaatactggaaggtatcggcgtcaaaaccgccctttcattccaaaaataccaaattgacgaactgggcaaagaaatcagaccatgccgtctgaaaaaacgcccgcctgtccgttacccatacgatgttccagattacgctgcagctccagcagcgaagaaaaagaagctggattaa

SEQ ID NO: 304 - protein, 1053 aa, Staphylococcus aureus; identical to SEQ ID NO: 26

SEQ ID NO: 305 - protein, 1368 aa, Streptococcus pyogenes [sequence omitted]

SEQ ID NO: 306 - protein, 984 aa, Campylobacter jejuni
MARILAFDIGISSIGWAFSENDELKDCGVRIFTKVENPKTGESLALPRRLARSARKRLARRKARLNHLKHLIANEFKLNYEDYQSFDESLAKAYKGSLISPYELRFRALNELLSKQDFARVILHIAKRRGYDDIKNSDDKEKGAILKAIKQNEEKLANYQSVGEYLYKEYFQKFKENSKEFTNVRNKKESYERCIAQSFLKDELKLIFKKQREFGFSFSKKFEEEVLSVAFYKRALKDFSHLVGNCSFFTDEKRAPKNSPLAFMFVALTRIINLLNNLKNTEGILYTKDDLNALLNEVLKNGTLTYKQTKKLLGLSDDYEFKGEKGTYFIEFKKYKEFIKALGEHNLSQDDLNEIAKDITLIKDEIKLKKALAKYDLNQNQIDSLSKLEFKDHLNISFKALKLVTPLMLEGKKYDEACNELNLKVAINEDKKDFLPAFNETYYKDEVTNPVVLRAIKEYRKVLNALLKKYGKVHKINIELAREVGKNHSQRAKIEKEQNENYKAKKDAELECEKLGLKINSKNILKLRLFKEQKEFCAYSGEKIKISDLQDEKMLEIDHIYPYSRSFDDSYMNKVLVFTKQNQEKLNQTPFEAFGNDSAKWQKIEVLAKNLPTKKQKRILDKNYKDKEQKNFKDRNLNDTRYIARLVLNYTKDYLDFLPLSDDENTKLNDTQKGSKVHVEAKSGMLTSALRHTWGFSAKDRNNHLHHAIDAVIIAYANNSIVKAFSDFKKEQESNSAELYAKKISELDYKNKRKFFEPFSGFRQKVLDKIDEIFVSKPERKKPSGALHEETFRKEEEFYQSYGGKEGVLKALELGKIRKVNGKIVKNGDMFRVDIFKHKKTNKFYAVPIYTMDFALKVLPNKAVARSKKGEIKDWILMDENYEFCFSLYKDSLILIQTKDMQEPEFVYYNAFTSSTVSLIVSKHDNKFETLSKNQKILFKNANEKEVIAKSIGIQNLKVFEKYIVSALGEVTKAEFRQREDFKK

SEQ ID NO: 307 - protein, 1436 aa, Bacteroides fragilis
MKRILGLDLGTNSIGWALVNEAENKDERSSIVKLGVRVNPLTVDELTNFEKGKSITTNADRTLKRGMRRNLQRYKLRRETLTEVLKEHKLITEDTILSENGNRTTFETYRLRAKAVTEEISLEEFARVLLMINKKRGYKSSRKAKGVEEGTLIDGMDIARELYNNNLTPGELCLQLLDAGKKFLPDFYRSDLQNELDRIWEKQKEYYPEILTDVLKEELRGKKRDAVWAICAKYFVWKENYTEWNKEKGKTEQQEREHKLEGIYSKRKRDEAKRENLQWRVNGLKEKLSLEQLVIVFQEMNTQINNSSGYLGAISDRSKELYFNKQTVGQYQMEMLDKNPNASLRNMVFYRQDYLDEFNMLWEKQAVYHKELTEELKKEIRDIIIFYQRRLKSQKGLIGFCEFESRQIEVDIDGKKKIKTVGNRVISRSSPLFQEFKIWQILNNIEVTVVGKKRKRRKLKENYSALFEELNDAEQLELNGSRRLCQEEKELLAQELFIRDKMTKSEVLKLLFDNPQELDLNFKTIDGNKTGYALFQAYSKMIEMSGHEPVDFKKPVEKVVEYIKAVFDLLNWNTDILGFNSNEELDNQPYYKLWHLLYSFEGDNTPTGNGRLIQKMTELYGFEKEYATILANVSFQDDYGSLSAKAIHKILPHLKEGNRYDVACVYAGYRHSESSLTREEIANKVLKDRLMLLPKNSLHNPVVEKILNQMVNVINVIIDIYGKPDEIRVELARELKKNAKEREELTKSIAQTTKAHEEYKTLLQTEFGLTNVSRTDILRYKLYKELESCGYKTLYSNTYISREKLFSKEFDIEHIIPQARLFDDSFSNKTLEARSVNIEKGNKTAYDFVKEKFGESGADNSLEHYLNNIEDLFKSGKISKTKYNKLKMAEQDIPDGFIERDLRNTQYIAKKALSMLNEISHRVVATSGSVTDKLREDWQLIDVMKELNWEKYKALGLVEYFEDRDGRQIGRIKDWTKRNDHRHHAMDALTVAFTKDVFIQYFNNKNASLDPNANEHAIKNKYFQNGRAIAPMPLREFRAEAKKHLENTLISIKAKNKVITGNINKTRKKGGVNKNMQQTPRGQLHLETIYGSGKQYLTKEEKVNASFDMRKIGTVSKSAYRDALLKRLYENDNDPKKAFAGKNSLDKQPIWLDKEQMRKVPEKVKIVTLEAIYTIRKEISPDLKVDKVIDVGVRKILIDRLNEYGNDAKKAFSNLDKNPIWLNKEKGISIKRVTISGISNAQSLHVKKDKDGKPILDENGRNIPVDFVNTGNNHHVAVYYRPVIDKRGQLVVDEAGNPKYELEEVVVSFFEAVTRANLGLPIIDKDYKTTEGWQFLFSMKQNEYFVFPNEKTGFNPKEIDLLDVENYGLISPNLFRVQKFSLKNYVFRHHLETTIKDTSSILRGITWIDFRSSKGLDTIVKVRVNHIGQIVSVGEY

SEQ ID NO: 308 - protein, 1420 aa, Bifidobacterium bifidum
MSRKNYVDDYAISLDIGNASVGWSAFTPNYRLVRAKGHELIGVRLFDPADTAESRRMARTTRRRYSRRRWRLRLLDALFDQALSEIDPSFLARRKYSWVHPDDENNADCWYGSVLFDSNEQDKRFYEKYPTIYHLRKALMEDDSQHDIREIYLAIHHMVKYRGNFLVEGTLESSNAFKEDELLKLLGRITRYEMSEGEQNSDIEQDDENKLVAPANGQLADALCATRGSRSMRVDNALEALSAVNDLSREQRAIVKAIFAGLEGNKLDLAKIFVSKEFSSENKKILGIYFNKSDYEEKCVQIVDSGLLDDEEREFLDRMQGQYNAIALKQLLGRSTSVSDSKCASYDAHRANWNLIKLQLRTKENEKDINENYGILVGWKIDSGQRKSVRGESAYENMRKKANVFFKKMIETSDLSETDKNRLIHDIEEDKLFPIQRDSDNGVIPHQLHQNELKQIIKKQGKYYPFLLDAFEKDGKQINKIEGLLTFRVPYFVGPLVVPEDLQKSDNSENHWMVRKKKGEITPWNFDEMVDKDASGRKFIERLVGTDSYLLGEPTLPKNSLLYQEYEVLNELNNVRLSVRTGNHWNDKRRMRLGREEKTLLCQRLFMKGQTVTKRTAENLLRKEYGRTYELSGLSDESKFTSSLSTYGKMCRIFGEKYVNEHRDLMEKIVELQTVFEDKETLLHQLRQLEGISEADCALLVNTHYTGWGRLSRKLLTTKAGECKISDDFAPRKHSIIEIMRAEDRNLMEIITDKQLGFSDWIEQENLGAENGSSLMEVVDDLRVSPKVKRGIIQSIRLIDDISKAVGKRPSRIFLELADDIQPSGRTISRKSRLQDLYRNANLGKEFKGIADELNACSDKDLQDDRLFLYYTQLGKDMYTGEELDLDRLSSAYDIDHIIPQAVTQNDSIDNRVLVARAENARKTDSFTYMPQIADRMRNFWQILLDNGLISRVKFERLTRQNEFSEREKERFVQRSLVETRQIMKNVATLMRQRYGNSAAVIGLNAELTKEMHRYLGFSHKNRDINDYHHAQDALCVGIAGQFAANRGFFADGEVSDGAQNSYNQYLRDYLRGYREKLSAEDRKQGRAFGFIVGSMRSQDEQKRVNPRTGEVVWSEEDKDYLRKVMNYRKMLVTQKVGDDFGALYDETRYAATDPKGIKGIPFDGAKQDTSLYGGFSSAKPAYAVLIESKGKTRLVNVTMQEYSLLGDRPSDDELRKVLAKKKSEYAKANILLRHVPKMQLIRYGGGLMVIKSAGELNNAQQLWLPYEEYCYFDDLSQGKGSLEKDDLKKLLDSILGSVQCLYPWHRFTEEELADLHVAFDKLPEDEKKNVITGIVSALHADAKTANLSIVGMTGSWRRMNNKSGYTFSDEDEFIFQSPSGLFEKRVTVGELKRKAKKEVNSKYRTNEKRLPTLSGASQP

SEQ ID NO: 309 - protein, 1397 aa, Veillonella atypica
METQTSNQLITSHLKDYPKQDYFVGLDIGTNSVGWAVTNTSYELLKFHSHKMWGSRLFEEGESAVTRRGFRSMRRRLERRKLRLKLLEELFADAMAQVDSTFFIRLHESKYHYEDKTTGHSSKHILFIDEDYTDQDYFTEYPTIYHLRKDLMENGTDDIRKLFLAVHHILKYRGNFLYEGATFNSNAFTFEDVLKQALVNITFNCFDTNSAISSISNILMESGKTKSDKAKAIERLVDTYTVFDEVNTPDKPQKEQVKEDKKTLKAFANLVLGLSANLIDLFGSVEDIDDDLKKLQIVGDTYDEKRDELAKVWGDEIHIIDDCKSVYDAIILMSIKEPGLTISQSKVKAFDKHKEDLVILKSLLKLDRNVYNEMFKSDKKGLHNYVHYIKQGRTEETSCSREDFYKYTKKIVEGLADSKDKEYILNEIELQTLLPLQRIKDNGVIPYQLHLEELKVILDKCGPKFPFLHTVSDGFSVTEKLIKMLEFRIPYYVGPLNTHHNIDNGGFSWAVRKQAGRVTPWNFEEKIDREKSAAAFIKNLTNKCTYLFGEDVLPKSSLLYSEFMLLNELNNVRIDGKALAQGVKQHLIDSIFKQDHKKMTKNRIELFLKDNNYITKKHKPEITGLDGEIKNDLTSYRDMVRILGNNFDVSMAEDIITDITIFGESKKMLRQTLRNKFGSQLNDETIKKLSKLRYRDWGRLSKKLLKGIDGCDKAGNGAPKTIIELMRNDSYNLMEILGDKFSFMECIEEENAKLAQGQVVNPHDIIDELALSPAVKRAVWQALRIVDEVAHIKKALPSRIFVEVARTNKSEKKKKDSRQKRLSDLYSAIKKDDVLQSGLQDKEFGALKSGLANYDDAALRSKKLYLYYTQMGRCAYTGNIIDLNQLNTDNYDIDHIYPRSLTKDDSFDNLVLCERTANAKKSDIYPIDNRIQTKQKPFWAFLKHQGLISERKYERLTRIAPLTADDLSGFIARQLVETNQSVKATTTLLRRLYPDIDVVFVKAENVSDFRHNNNFIKVRSLNHHHHAKDAYLNIVVGNVYHEKFTRNFRLFFKKNGANRTYNLAKMFNYDVICTNAQDGKAWDVKTSMNTVKKMMASNDVRVTRRLLEQSGALADATIYKASVAAKAKDGAYIGMKTKYSVFADVTKYGGMTKIKNAYSIIVQYTGKKGEEIKEIVPLPIYLINRNATDIELIDYVKSVIPKAKDISIKYRKLCINQLVKVNGFYYYLGGKTNDKIYIDNAIELVVPHDIATYIKLLDKYDLLRKENKTLKASSITTSIYNINTSTVVSLNKVGIDVFDYFMSKLRTPLYMKMKGNKVDELSSTGRSKFIKMTLEEQSIYLLEVLNLLTNSKTTFDVKPLGITGSRSTIGVKIHNLDEFKIINESITGLYSNEVTIV

SEQ ID NO: 310 - protein, 1363 aa, Lactobacillus rhamnosus
MTKLNQPYGIGLDIGSNSIGFAVVDANSHLLRLKGETAIGARLFREGQSAADRRGSRTTRRRLSRTRWRLSFLRDFFAPHITKIDPDFFLRQKYSEISPKDKDRFKYEKRLFNDRTDAEFYEDYPSMYHLRLHLMTHTHKADPREIFLAIHHILKSRGHFLTPGAAKDFNTDKVDLEDIFPALTEAYAQVYPDLELTFDLAKADDFKAKLLDEQATPSDTQKALVNLLLSSDGEKEIVKKRKQVLTEFAKAITGLKTKFNLALGTEVDEADASNWQFSMGQLDDKWSNIETSMTDQGTEIFEQIQELYRARLLNGIVPAGMSLSQAKVADYGQHKEDLELFKTYLKKLNDHELAKTIRGLYDRYINGDDAKPFLREDFVKALTKEVTAHPNEVSEQLLNRMGQANFMLKQRTKANGAIPIQLQQRELDQIIANQSKYYDWLAAPNPVEAHRWKMPYQLDELLNFHIPYYVGPLITPKQQAESGENVFAWMVRKDPSGNITPYNFDEKVDREASANTFIQRMKTTDTYLIGEDVLPKQSLLYQKYEVLNELNNVRINNECLGTDQKQRLIREVFERHSSVTIKQVADNLVAHGDFARRPEIRGLADEKRFLSSLSTYHQLKEILHEAIDDPTKLLDIENIITWSTVFEDHTIFETKLAEIEWLDPKKINELSGIRYRGWGQFSRKLLDGLKLGNGHTVIQELMLSNHNLMQILADETLKETMTELNQDKLKTDDIEDVINDAYTSPSNKKALRQVLRVVEDIKHAANGQDPSWLFIETADGTGTAGKRTQSRQKQIQTVYANAAQELIDSAVRGELEDKIADKASFTDRLVLYFMQGGRDIYTGAPLNIDQLSHYDIDHILPQSLIKDDSLDNRVLVNATINREKNNVFASTLFAGKMKATWRKWHEAGLISGRKLRNLMLRPDEIDKFAKGFVARQLVETRQIIKLTEQIAAAQYPNTKIIAVKAGLSHQLREELDFPKNRDVNHYHHAFDAFLAARIGTYLLKRYPKLAPFFTYGEFAKVDVKKFREFNFIGALTHAKKNIIAKDTGEIVWDKERDIRELDRIYNFKRMLITHEVYFETADLFKQTIYAAKDSKERGGSKQLIPKKQGYPTQVYGGYTQESGSYNALVRVAEADTTAYQVIKISAQNASKIASANLKSREKGKQLLNEIVVKQLAKRRKNWKPSANSFKIVIPRFGMGTLFQNAKYGLFMVNSDTYYRNYQELWLSRENQKLLKKLFSIKYEKTQMNHDALQVYKAIIDQVEKFFKLYDINQFRAKLSDAIERFEKLPINTDGNKIGKTETLRQILIGLQANGTRSNVKNLGIKTDLGLLQVGSGIKLDKDTQIVYQSPSGLFKRRIPLADL

SEQ ID NO: 311 - protein, 1365 aa, Filifactor alocis
MTKEYYLGLDVGTNSVGWAVTDSQYNLCKFKKKDMWGIRLFESANTAKDRRLQRGNRRRLERKKQRIDLLQEIFSPEICKIDPTFFIRLNESRLHLEDKSNDFKYPLFIEKDYSDIEYYKEFPTIFHLRKHLIESEEKQDIRLIYLALHNIIKTRGHFLIDGDLQSAKQLRPILDTFLLSLQEEQNLSVSLSENQKDEYEEILKNRSIAKSEKVKKLKNLFEISDELEKEEKKAQSAVIENFCKFIVGNKGDVCKFLRVSKEELEIDSFSFSEGKYEDDIVKNLEEKVPEKVYLFEQMKAMYDWNILVDILETEEYISFAKVKQYEKHKTNLRLLRDIILKYCTKDEYNRMFNDEKEAGSYTAYVGKLKKNNKKYWIEKKRNPEEFYKSLGKLLDKIEPLKEDLEVLTMMIEECKNHTLLPIQKNKDNGVIPHQVHEVELKKILENAKKYYSFLTETDKDGYSVVQKIESIFRFRIPYYVGPLSTRHQEKGSNVWMVRKPGREDRIYPWNMEEIIDFEKSNENFITRMTNKCTYLIGEDVLPKHSLLYSKYMVLNELNNVKVRGKKLPTSLKQKVFEDLFENKSKVTGKNLLEYLQIQDKDIQIDDLSGFDKDFKTSLKSYLDFKKQIFGEEIEKESIQNMIEDIIKWITIYGNDKEMLKRVIRANYSNQLTEEQMKKITGFQYSGWGNFSKMFLKGISGSDVSTGETFDIITAMWETDNNLMQILSKKFTFMDNVEDFNSGKVGKIDKITYDSTVKEMFLSPENKRAVWQTIQVAEEIKKVMGCEPKKIFIEMARGGEKVKKRTKSRKAQLLELYAACEEDCRELIKEIEDRDERDFNSMKLFLYYTQFGKCMYSGDDIDINELIRGNSKWDRDHIYPQSKIKDDSIDNLVLVNKTYNAKKSNELLSEDIQKKMHSFWLSLLNKKLITKSKYDRLTRKGDFTDEELSGFIARQLVETRQSTKAIADIFKQIYSSEVVYVKSSLVSDFRKKPLNYLKSRRVNDYHHAKDAYLNIVVGNVYNKKFTSNPIQWMKKNRDTNYSLNKVFEHDVVINGEVIWEKCTYHEDTNTYDGGTLDRIRKIVERDNILYTEYAYCEKGELFNATIQNKNGNSTVSLKKGLDVKKYGGYFSANTSYFSLIEFEDKKGDRARHIIGVPIYIANMLEHSPSAFLEYCEQKGYQNVRILVEKIKKNSLLIINGYPLRIRGENEVDTSFKRAIQLKLDQKNYELVRNIEKFLEKYVEKKGNYPIDENRDHITHEKMNQLYEVLLSKMKKFNKKGMADPSDRIEKSKPKFIKLEDLIDKINVINKMLNLLRCDNDTKADLSLIELPKNAGSFVVKKNTIGKSKIILVNQSVTGLYENRREL

SEQ ID NO: 312 - protein, 1389 aa, Oenococcus kitaharae
MARDYSVGLDIGTSSVGWAAIDNKYHLIRAKSKNLIGVRLFDSAVTAEKRRGYRTTRRRLSRRHWRLRLLNDIFAGPLTDFGDENFLARLKYSWVHPQDQSNQAHFAAGLLFDSKEQDKDFYRKYPTIYHLRLALMNDDQKHDLREVYLAIHHLVKYRGHFLIEGDVKADSAFDVHTFADAIQRYAESNNSDENLLGKIDEKKLSAALTDKHGSKSQRAETAETAFDILDLQSKKQIQAILKSVVGNQANLMAIFGLDSSAISKDEQKNYKFSFDDADIDEKIADSEALLSDTEFEFLCDLKAAFDGLTLKMLLGDDKTVSAAMVRRFNEHQKDWEYIKSHIRNAKNAGNGLYEKSKKFDGINAAYLALQSDNEDDRKKAKKIFQDEISSADIPDDVKADFLKKIDDDQFLPIQRTKNNGTIPHQLHRNELEQIIEKQGIYYPFLKDTYQENSHELNKITALINFRVPYYVGPLVEEEQKIADDGKNIPDPTNHWMVRKSNDTITPWNLSQVVDLDKSGRRFIERLTGTDTYLIGEPTLPKNSLLYQKFDVLQELNNIRVSGRRLDIRAKQDAFEHLFKVQKTVSATNLKDFLVQAGYISEDTQIEGLADVNGKNFNNALTTYNYLVSVLGREFVENPSNEELLEEITELQTVFEDKKVLRRQLDQLDGLSDHNREKLSRKHYTGWGRISKKLLTTKIVQNADKIDNQTFDVPRMNQSIIDTLYNTKMNLMEIINNAEDDFGVRAWIDKQNTTDGDEQDVYSLIDELAGPKEIKRGIVQSFRILDDITKAVGYAPKRVYLEFARKTQESHLTNSRKNQLSTLLKNAGLSELVTQVSQYDAAALQNDRLYLYFLQQGKDMYSGEKLNLDNLSNYDIDHIIPQAYTKDNSLDNRVLVSNITNRRKSDSSNYLPALIDKMRPFWSVLSKQGLLSKHKFANLTRTRDFDDMEKERFIARSLVETRQIIKNVASLIDSHFGGETKAVAIRSSLTADMRRYVDIPKNRDINDYHHAFDALLFSTVGQYTENSGLMKKGQLSDSAGNQYNRYIKEWIHAARLNAQSQRVNPFGFVVGSMRNAAPGKLNPETGEITPEENADWSIADLDYLHKVMNFRKITVTRRLKDQKGQLYDESRYPSVLHDAKSKASINFDKHKPVDLYGGFSSAKPAYAALIKFKNKFRLVNVLRQWTYSDKNSEDYILEQIRGKYPKAEMVLSHIPYGQLVKKDGALVTISSATELHNFEQLWLPLADYKLINTLLKTKEDNLVDILHNRLDLPEMTIESAFYKAFDSILSFAFNRYALHQNALVKLQAHRDDFNALNYEDKQQTLERILDALHASPASSDLKKINLSSGFGRLFSPSHFTLADTDEFIFQSVTGLFSTQKTVAQLYQETK

SEQ ID NO: 313 - protein, 1323 aa, Fructobacillus fructosus
MVYDVGLDIGTGSVGWVALDENGKLARAKGKNLVGVRLFDTAQTAADRRGFRTTRRRLSRRKWRLRLLDELFSAEINEIDSSFFQRLKYSYVHPKDEENKAHYYGGYLFPTEEETKKFHRSYPTIYHLRQELMAQPNKRFDIREIYLAIHHLVKYRGHFLSSQEKITIGSTYNPEDLANAIEVYADEKGLSWELNNPEQLTEIISGEAGYGLNKSMKADEALKLFEFDNNQDKVAIKTLLAGLTGNQIDFAKLFGKDISDKDEAKLWKLKLDDEALEEKSQTILSQLTDEEIELFHAVVQAYDGFVLIGLLNGADSVSAAMVQLYDQHREDRKLLKSLAQKAGLKHKRFSEIYEQLALATDEATIKNGISTARELVEESNLSKEVKEDTLRRLDENEFLPKQRTKANSVIPHQLHLAELQKILQNQGQYYPFLLDTFEKEDGQDNKIEELLRFRIPYYVGPLVTKKDVEHAGGDADNHWVERNEGFEKSRVTPWNFDKVFNRDKAARDFIERLTGNDTYLIGEKTLPQNSLRYQLFTVLNELNNVRVNGKKFDSKTKADLINDLFKARKTVSLSALKDYLKAQGKGDVTITGLADESKFNSSLSSYNDLKKTFDAEYLENEDNQETLEKIIEIQTVFEDSKIASRELSKLPLDDDQVKKLSQTHYTGWGRLSEKLLDSKIIDERGQKVSILDKLKSTSQNFMSIINNDKYGVQAWITEQNTGSSKLTFDEKVNELTTSPANKRGIKQSFAVLNDIKKAMKEEPRRVYLEFAREDQTSVRSVPRYNQLKEKYQSKSLSEEAKVLKKTLDGNKNKMSDDRYFLYFQQQGKDMYTGRPINFERLSQDYDIDHIIPQAFTKDDSLDNRVLVSRPENARKSDSFAYTDEVQKQDGSLWTSLLKSGFINRKKYERLTKAGKYLDGQKTGFIARQLVETRQIIKNVASLIEGEYENSKAVAIRSEITADMRLLVGIKKHREINSFHHAFDALLITAAGQYMQNRYPDRDSTNVYNEFDRYTNDYLKNLRQLSSRDEVRRLKSFGFVVGTMRKGNEDWSEENTSYLRKVMMFKNILTTKKTEKDRGPLNKETIFSPKSGKKLIPLNSKRSDTALYGGYSNVYSAYMTLVRANGKNLLIKIPISIANQIEVGNLKINDYIVNNPAIKKFEKILISKLPLGQLVNEDGNLIYLASNEYRHNAKQLWLSTTDADKIASISENSSDEELLEAYDILTSENVKNRFPFFKKDIDKLSQVRDEFLDSDKRIAVIQTILRGLQIDAAYQAPVKIISKKVSDWHKLQQSGGIKLSDNSEMIYQSATGIFETRVKISDLL

SEQ ID NO: 314 - protein, 1329 aa, Catenibacterium mitsuokai
IVDYCIGLDLGTGSVGWAVVDMNHRLMKRNGKHLWGSRLFSNAETAANRRASRSIRRRYNKRRERIRLLRAILQDMVLEKDPTFFIRLEHTSFLDEEDKAKYLGTDYKDNYNLFIDEDFNDYTYYHKYPTIYHLRKALCESTEKADPRLIYLALHHIVKYRGNFLYEGQKFNMDASNIEDKLSDIFTQFTSFNNIPYEDDEKKNLEILEILKKPLSKKAKVDEVMTLIAPEKDYKSAFKELVTGIAGNKMNVTKMILCEPIKQGDSEIKLKFSDSNYDDQFSEVEKDLGEYVEFVDALHNVYSWVELQTIMGATHTDNASISEAMVSRYNKHHDDLKLLKDCIKNNVPNKYFDMFRNDSEKSKGYYNYINRPSKAPVDEFYKYVKKCIEKVDTPEAKQILNDIELENFLLKQNSRTNGSVPYQMQLDEMIKIIDNQAEYYPILKEKREQLLSILTFRIPYYFGPLNETSEHAWIKRLEGKENQRILPWNYQDIVDVDATAEGFIKRMRSYCTYFPDEEVLPKNSLIVSKYEVYNELNKIRVDDKLLEVDVKNDIYNELFMKNKTVTEKKLKNWLVNNQCCSKDAEIKGFQKENQFSTSLTPWIDFTNIFGKIDQSNFDLIENIIYDLTVFEDKKIMKRRLKKKYALPDDKVKQILKLKYKDWSRLSKKLLDGIVADNRFGSSVTVLDVLEMSRLNLMEIINDKDLGYAQMIEEATSCPEDGKFTYEEVERLAGSPALKRGIWQSLQIVEEITKVMKCRPKYIYIEFERSEEAKERTESKIKKLENVYKDLDEQTKKEYKSVLEELKGFDNTKKISSDSLFLYFTQLGKCMYSGKKLDIDSLDKYQIDHIVPQSLVKDDSFDNRVLVVPSENQRKLDDLVVPFDIRDKMYRFWKLLFDHELISPKKFYSLIKTEYTERDEERFINRQLVETRQITKNVTQIIEDHYSTTKVAAIRANLSHEFRVKNHIYKNRDINDYHHAHDAYIVALIGGFMRDRYPNMHDSKAVYSEYMKMFRKNKNDQKRWKDGFVINSMNYPYEVDGKLIWNPDLINEIKKCFYYKDCYCTTKLDQKSGQLFNLTVLSNDAHADKGVTKAVVPVNKNRSDVHKYGGFSGLQYTIVAIEGQKKKGKKTELVKKISGVPLHLKAASINEKINYIEEKEGLSDVRIIKDNIPVNQMIEMDGGEYLLTSPTEYVNARQLVLNEKQCALIADIYNAIYKQDYDNLDDILMIQLYIELTNKMKVLYPAYRGIAEKFESMNENYVVISKEEKANIIKQMLIVMHRGPQNGNIVYDDFKISDRIGRLKTKNHNLNNIVFISQSPTGIYTKKYKL

SEQ ID NO: 315 - protein, 1348 aa, Finegoldia magna
MKSEKKYYIGLDVGTNSVGWAVTDEFYNILRAKGKDLWGVRLFEKADTAANTRIFRSGRRRNDRKGMRLQILREIFEDEIKKVDKDFYDRLDESKFWAEDKKVSGKYSLFNDKNFSDKQYFEKFPTIFHLRKYLMEEHGKVDIRYYFLAINQMMKRRGHFLIDGQISHVTDDKPLKEQLILLINDLLKIELEEELMDSIFEILADVNEKRTDKKNNLKELIKGQDFNKQEGNILNSIFESIVTGKAKIKNIISDEDILEKIKEDNKEDFVLTGDSYEENLQYFEEVLQENITLFNTLKSTYDFLILQSILKGKSTLSDAQVERYDEHKKDLEILKKVIKKYDEDGKLFKQVFKEDNGNGYVSYIGYYLNKNKKITAKKKISNIEFTKYVKGILEKQCDCEDEDVKYLLGKIEQENFLLKQISSINSVIPHQIHLFELDKILENLAKNYPSFNNKKEEFTKIEKIRKTFTFRIPYYVGPLNDYHKNNGGNAWIFRNKGEKIRPWNFEKIVDLHKSEEEFIKRMLNQCTYLPEETVLPKSSILYSEYMVLNELNNLRINGKPLDTDVKLKLIEELFKKKTKVTLKSIRDYMVRNNFADKEDFDNSEKNLEIASNMKSYIDFNNILEDKFDVEMVEDLIEKITIHTGNKKLLKKYIEETYPDLSSSQIQKIINLKYKDWGRLSRKLLDGIKGTKKETEKTDTVINFLRNSSDNLMQIIGSQNYSFNEYIDKLRKKYIPQEISYEVVENLYVSPSVKKMIWQVIRVTEEITKVMGYDPDKIFIEMAKSEEEKKTTISRKNKLLDLYKAIKKDERDSQYEKLLTGLNKLDDSDLRSRKLYLYYTQMGRDMYTGEKIDLDKLFDSTHYDKDHIIPQSMKKDDSIINNLVLVNKNANQTTKGNIYPVPSSIRNNPKIYNYWKYLMEKEFISKEKYNRLIRNTPLTNEELGGFINRQLVETRQSTKAIKELFEKFYQKSKIIPVKASLASDLRKDMNTLKSREVNDLHHAHDAFLNIVAGDVWNREFTSNPINYVKENREGDKVKYSLSKDFTRPRKSKGKVIWTPEKGRKLIVDTLNKPSVLISNESHVKKGELFNATIAGKKDYKKGKIYLPLKKDDRLQDVSKYGGYKAINGAFFFLVEHTKSKKRIRSIELFPLHLLSKFYEDKNTVLDYAINVLQLQDPKIIIDKINYRTEIIIDNFSYLISTKSNDGSITVKPNEQMYWRVDEISNLKKIENKYKKDAILTEEDRKIMESYIDKIYQQFKAGKYKNRRTTDTIIEKYEIIDLDTLDNKQLYQLLVAFISLSYKTSNNAVDFTVIGLGTECGKPRITNLPDNTYLVYKSITGIYEKRIRIK

SEQ ID NO: 316 - protein, 1384 aa, Coriobacterium glomerans
MKLRGIEDDYSIGLDMGTSSVGWAVTDERGTLAHFKRKPTWGSRLFREAQTAAVARMPRGQRRRYVRRRWRLDLLQKLFEQQMEQADPDFFIRLRQSRLLRDDRAEEHADYRWPLFNDCKFTERDYYQRFPTIYHVRSWLMETDEQADIRLIYLALHNIVKHRGNFLREGQSLSAKSARPDEALNHLRETLRVWSSERGFECSIADNGSILAMLTHPDLSPSDRRKKIAPLFDVKSDDAAADKKLGIALAGAVIGLKTEFKNIFGDFPCEDSSIYLSNDEAVDAVRSACPDDCAELFDRLCEVYSAYVLQGLLSYAPGQTISANMVEKYRRYGEDLALLKKLVKIYAPDQYRMFFSGATYPGTGIYDAAQARGYTKYNLGPKKSEYKPSESMQYDDFRKAVEKLFAKTDARADERYRMMMDRFDKQQFLRRLKTSDNGSIYHQLHLEELKAIVENQGRFYPFLKRDADKLVSLVSFRIPYYVGPLSTRNARTDQHGENRFAWSERKPGMQDEPIFPWNWESIIDRSKSAEKFILRMTGMCTYLQQEPVLPKSSLLYEEFCVLNELNGAHWSIDGDDEHRFDAADREGIIEELFRRKRTVSYGDVAGWMERERNQIGAHVCGGQGEKGFESKLGSYIFFCKDVFKVERLEQSDYPMIERIILWNTLFEDRKILSQRLKEEYGSRLSAEQIKTICKKRFTGWGRLSEKFLTGITVQVDEDSVSIMDVLREGCPVSGKRGRAMVMMEILRDEELGFQKKVDDFNRAFFAENAQALGVNELPGSPAVRRSLNQSIRIVDEIASIAGKAPANIFIEVTRDEDPKKKGRRTKRRYNDLKDALEAFKKEDPELWRELCETAPNDMDERLSLYFMQRGKCLYSGRAIDIHQLSNAGIYEVDHIIPRTYVKDDSLENKALVYREENQRKTDMLLIDPEIRRRMSGYWRMLHEAKLIGDKKFRNLLRSRIDDKALKGFIARQLVETGQMVKLVRSLLEARYPETNIISVKASISHDLRTAAELVKCREANDFHHAHDAFLACRVGLFIQKRHPCVYENPIGLSQVVRNYVRQQADIFKRCRTIPGSSGFIVNSFMTSGFDKETGEIFKDDWDAEAEVEGIRRSLNFRQCFISRMPFEDHGVFWDATIYSPRAKKTAALPLKQGLNPSRYGSFSREQFAYFFIYKARNPRKEQTLFEFAQVPVRLSAQIRQDENALERYARELAKDQGLEFIRIERSKILKNQLIEIDGDRLCITGKEEVRNACELAFAQDEMRVIRMLVSEKPVSRECVISLFNRILLHGDQASRRLSKQLKLALLSEAFSEASDNVQRNVVLGLIAIFNGSTNMVNLSDIGGSKFAGNVRIKYKKELASPKVNVHLIDQSVTGMFERRTKIGL

SEQ ID NO: 317 - protein, 1391 aa, Eubacterium yurii
MENKQYYIGLDVGTNSVGWAVTDTSYNLLRAKGKDMWGARLFEKANTAAERRTKRTSRRRSEREKARKAMLKELFADEINRVDPSFFIRLEESKFFLDDRSENNRQRYTLFNDATFTDKDYYEKYKTIFHLRSALINSDEKFDVRLVFLAILNLFSHRGHFLNASLKGDGDIQGMDVFYNDLVESCEYFEIELPRITNIDNFEKILSQKGKSRTKILEELSEELSISKKDKSKYNLIKLISGLEASVVELYNIEDIQDENKKIKIGFRESDYEESSLKVKEIIGDEYFDLVERAKSVHDMGLLSNIIGNSKYLCEARVEAYENHHKDLLKIKELLKKYDKKAYNDMFRKMTDKNYSAYVGSVNSNIAKERRSVDKRKIEDLYKYIEDTALKNIPDDNKDKIEILEKIKLGEFLKKQLTASNGVIPNQLQSRELRAILKKAENYLPFLKEKGEKNLTVSEMIIQLFEFQIPYYVGPLDKNPKKDNKANSWAKIKQGGRILPWNFEDKVDVKGSRKEFIEKMVRKCTYISDEHTLPKQSLLYEKFMVLNEINNIKIDGEKISVEAKQKIYNDLFVKGKKVSQKDIKKELISLNIMDKDSVLSGTDTVCNAYLSSIGKFTGVFKEEINKQSIVDMIEDIIFLKTVYGDEKRFVKEEIVEKYGDEIDKDKIKRILGFKFSNWGNLSKSFLELEGADVGTGEVRSIIQSLWETNFNLMELLSSRFTYMDELEKRVKKLEKPLSEWTIEDLDDMYLSSPVKRMIWQSMKIVDEIQTVIGYAPKRIFVEMTRSEGEKVRTKSRKDRLKELYNGIKEDSKQWVKELDSKDESYFRSKKMYLYYLQKGRCMYSGEVIELDKLMDDNLYDIDHIYPRSFVKDDSLDNLVLVKKEINNRKQNDPITPQIQASCQGFWKILHDQGFMSNEKYSRLTRKTQEFSDEEKLSFINRQIVETGQATKCMAQILQKSMGEDVDVVFSKARLVSEFRHKFELFKSRLINDFHHANDAYLNIVVGNSYFVKFTRNPANFIKDARKNPDNPVYKYHMDRFFERDVKSKSEVAWIGQSEGNSGTIVIVKKTMAKNSPLITKKVEEGHGSITKETIVGVKEIKFGRNKVEKADKTPKKPNLQAYRPIKTSDERLCNILRYGGRTSISISGYCLVEYVKKRKTIRSLEAIPVYLGRKDSLSEEKLLNYFRYNLNDGGKDSVSDIRLCLPFISTNSLVKIDGYLYYLGGKNDDRIQLYNAYQLKMKKEEVEYIRKIEKAVSMSKFDEIDREKNPVLTEEKNIELYNKIQDKFENTVFSKRMSLVKYNKKDLSFGDFLKNKKSKFEEIDLEKQCKVLYNIIFNLSNLKEVDLSDIGGSKSTGKCRCKKNITNYKEFKLIQQSITGLYSCEKDLMTI

SEQ ID NO: 318 - protein, 1364 aa, Peptoniphilus duerdenii
MKNLKEYYIGLDIGTASVGWAVTDESYNIPKFNGKKMWGVRLFDDAKTAEERRTQRGSRRRLNRRKERINLLQDLFATEISKVDPNFFLRLDNSDLYREDKDEKLKSKYTLFNDKDFKDRDYHKKYPTIHHLIMDLIEDEGKKDIRLLYLACHYLLKNRGHFIFEGQKFDTKNSFDKSINDLKIHLRDEYNIDLEFNNEDLIEIITDTTLNKTNKKKELKNIVGDTKFLKAISAIMIGSSQKLVDLFEDGEFEETTVKSVDFSTTAFDDKYSEYEEALGDTISLLNILKSIYDSSILENLLKDADKSKDGNKYISKAFVKKFNKHGKDLKTLKRIIKKYLPSEYANIFRNKSINDNYVAYTKSNITSNKRTKASKFTKQEDFYKFIKKHLDTIKETKLNSSENEDLKLIDEMLTDIEFKTFIPKLKSSDNGVIPYQLKLMELKKILDNQSKYYDFLNESDEYGTVKDKVESIMEFRIPYYVGPLNPDSKYAWIKRENTKITPWNFKDIVDLDSSREEFIDRLIGRCTYLKEEKVLPKASLIYNEFMVLNELNNLKLNEFLITEEMKKAIFEELFKTKKKVTLKAVSNLLKKEFNLTGDILLSGTDGDFKQGLNSYIDFKNIIGDKVDRDDYRIKIEEIIKLIVLYEDDKTYLKKKIKSAYKNDFTDDEIKKIAALNYKDWGRLSKRFLTGIEGVDKTTGEKGSIIYFMREYNLNLMELMSGHYTFTEEVEKLNPVENRELCYEMVDELYLSPSVKRMLWQSLRVVDEIKRIIGKDPKKIFIEMARAKEAKNSRKESRKNKLLEFYKFGKKAFINEIGEERYNYLLNEINSEEESKFRWDNLYLYYTQLGRCMYSLEPIDLADLKSNNIYDQDHIYPKSKIYDDSLENRVLVKKNLNHEKGNQYPIPEKVLNKNAYGFWKILFDKGLIGQKKYTRLTRRTPFEERELAEFIERQIVETRQATKETANLLKNICQDSEIVYSKAENASRFRQEFDIIKCRTVNDLHHMHDAYLNIVVGNVYNTKFTKNPLNFIKDKDNVRSYNLENMFKYDVVRGSYTAWIADDSEGNVKAATIKKVKRELEGKNYRFTRMSYIGTGGLYDQNLMRKGKGQIPQKENTNKSNIEKYGGYNKASSAYFALIESDGKAGRERTLETIPIMVYNQEKYGNTEAVDKYLKDNLELQDPKILKDKIKINSLIKLDGFLYNIKGKTGDSLSIAGSVQLIVNKEEQKLIKKMDKFLVKKKDNKDIKVTSFDNIKEEELIKLYKTLSDKLNNGIYSNKRNNQAKNISEALDKFKEISIEEKIDVLNQIILLFQSYNNGCNLKSIGLSAKTGVVFIPKKLNYKECKLINQSITGLFENEVDLLNL

SEQ ID NO: 319 - protein, 1358 aa, Acidaminococcus sp.
MGKMYYLGLDIGTNSVGYAVTDPSYHLLKFKGEPMWGAHVFAAGNQSAERRSFRTSRRRLDRRQQRVKLVQEIFAPVISPIDPRFFIRLHESALWRDDVAETDKHIFFNDPTYTDKEYYSDYPTIHHLIVDLMESSEKHDPRLVYLAVAWLVAHRGHFLNEVDKDNIGDVLSFDAFYPEFLAFLSDNGVSPWVCESKALQATLLSRNSVNDKYKALKSLIFGSQKPEDNFDANISEDGLIQLLAGKKVKVNKLFPQESNDASFTLNDKEDAIEEILGTLTPDECEWIAHIRRLFDWAIMKHALKDGRTISESKVKLYEQHHHDLTQLKYFVKTYLAKEYDDIFRNVDSETTKNYVAYSYHVKEVKGTLPKNKATQEEFCKYVLGKVKNIECSEADKVDFDEMIQRLTDNSFMPKQVSGENRVIPYQLYYYELKTILNKAASYLPFLTQCGKDAISNQDKLLSIMTFRIPYFVGPLRKDNSEHAWLERKAGKIYPWNFNDKVDLDKSEEAFIRRMTNTCTYYPGEDVLPLDSLIYEKFMILNEINNIRIDGYPISVDVKQQVFGLFEKKRRVTVKDIQNLLLSLGALDKHGKLTGIDTTIHSNYNTYHHFKSLMERGVLTRDDVERIVERMTYSDDTKRVRLWLNNNYGTLTADDVKHISRLRKHDFGRLSKMFLTGLKGVHKETGERASILDFMWNTNDNLMQLLSECYTFSDEITKLQEAYYAKAQLSLNDFLDSMYISNAVKRPIYRTLAVVNDIRKACGTAPKRIFIEMARDGESKKKRSVTRREQIKNLYRSIRKDFQQEVDFLEKILENKSDGQLQSDALYLYFAQLGRDMYTGDPIKLEHIKDQSFYNIDHIYPQSMVKDDSLDNKVLVQSEINGEKSSRYPLDAAIRNKMKPLWDAYYNHGLISLKKYQRLTRSTPFTDDEKWDFINRQLVETRQSTKALAILLKRKFPDTEIVYSKAGLSSDFRHEFGLVKSRNINDLHHAKDAFLAIVTGNVYHERFNRRWFMVNQPYSVKTKTLFTHSIKNGNFVAWNGEEDLGRIVKMLKQNKNTIHFTRFSFDRKEGLFDIQPLKASTGLVPRKAGLDVVKYGGYDKSTAAYYLLVRFTLEDKKTQHKLMMIPVEGLYKARIDHDKEFLTDYAQTTISEILQKDKQKVINIMFPMGTRHIKLNSMISIDGFYLSIGGKSSKGKSVLCHAMVPLIVPHKIECYIKAMESFARKFKENNKLRIVEKFDKITVEDNLNLYELFLQKLQHNPYNKFFSTQFDVLTNGRSTFTKLSPEEQVQTLLNILSIFKTCRSSGCDLKSINGSAQAARIMISADLTGLSKKYSDIRLVEQSASGLFVSKSQNLLEYL

SEQ ID NO: 320 - protein, 1356 aa, Lactobacillus farciminis
MTKKEQPYNIGLDIGTSSVGWAVTNDNYDLLNIKKKNLWGVRLFEEAQTAKETRLNRSTRRRYRRRKNRINWLNEIFSEELAKTDPSFLIRLQNSWVSKKDPDRKRDKYNLFIDGPYTDKEYYREFPTIFHLRKELILNKDKADIRLIYLALHNILKYRGNFTYEHQKFNISNLNNNLSKELIELNQQLIKYDISFPDDCDWNHISDILIGRGNATQKSSNILKDFTLDKETKKLLKEVINLILGNVAHLNTIFKTSLTKDEEKLNFSGKDIESKLDDLDSILDDDQFTVLDAANRIYSTITLNEILNGESYFSMAKVNQYENHAIDLCKLRDMWHTTKNEEAVEQSRQAYDDYINKPKYGTKELYTSLKKFLKVALPTNLAKEAEEKISKGTYLVKPRNSENGVVPYQLNKIEMEKIIDNQSQYYPFLKENKEKLLSILSFRIPYYVGPLQSAEKNPFAWMERKSNGHARPWNFDEIVDREKSSNKFIRRMTVTDSYLVGEPVLPKNSLIYQRYEVLNELNNIRITENLKTNPIGSRLTVETKQRIYNELFKKYKKVTVKKLTKWLIAQGYYKNPILIGLSQKDEFNSTLTTYLDMKKIFGSSFMEDNKNYDQIEELIEWLTIFEDKQILNEKLHSSKYSYTPDQIKKISNMRYKGWGRLSKKILMDITTETNTPQLLQLSNYSILDLMWATNNNFISIMSNDKYDFKNYIENHNLNKNEDQNISDLVNDIHVSPALKRGITQSIKIVQEIVKFMGHAPKHIFIEVTRETKKSEITTSREKRIKRLQSKLLNKANDFKPQLREYLVPNKKIQEELKKHKNDLSSERIMLYFLQNGKSLYSEESLNINKLSDYQVDHILPRTYIPDDSLENKALVLAKENQRKADDLLLNSNVIDRNLERWTYMLNNNMIGLKKFKNLTRRVITDKDKLGFIHRQLVQTSQMVKGVANILDNMYKNQGTTCIQARANLSTAFRKALSGQDDTYHFKHPELVKNRNVNDFHHAQDAYLASFLGTYRLRRFPTNEMLLMNGEYNKFYGQVKELYSKKKKLPDSRKNGFIISPLVNGTTQYDRNTGEIIWNVGFRDKILKIFNYHQCNVTRKTEIKTGQFYDQTIYSPKNPKYKKLIAQKKDMDPNIYGGFSGDNKSSITIVKIDNNKIKPVAIPIRLINDLKDKKTLQNWLEENVKHKKSIQIIKNNVPIGQIIYSKKVGLLSLNSDREVANRQQLILPPEHSALLRLLQIPDEDLDQILAFYDKNILVEILQELITKMKKFYPFYKGEREFLIANIENFNQATTSEKVNSLEELITLLHANSTSAHLIFNNIEKKAFGRKTHGLTLNNTDFIYQSVTGLYETRIHIE

SEQ ID NO: 321 - protein, 1421 aa, Streptococcus sanguinis
MTKFNKNYSIGLDIGVSSVGYAVVTEDYRVPAFKFKVLGNTEKEKIKKNLIGSTTFVSAQPAKGTRVFRVNRRRIDRRNHRITYLRDIFQKEIEKVDKNFYRRLDESFRVLGDKSEDLQIKQPFFGDKELETAYHKKYPTIYHLRKHLADADKNSPVADIREVYMAISHILKYRGHFLTLDKINPNNINMQNSWIDFIESCQEVFDLEISDESKNIADIFKSSENRQEKVKKILPYFQQELLKKDKSIFKQLLQLLFGLKTKFKDCFELEEEPDLNFSKENYDENLENFLGSLEEDFSDVFAKLKVLRDTILLSGMLTYTGATHARFSATMVERYEEHRKDLQRFKFFIKQNLSEQDYLDIFGRKTQNGFDVDKETKGYVGYITNKMVLTNPQKQKTIQQNFYDYISGKITGIEGAEYFLNKISDGTFLRKLRTSDNGAIPNQIHAYELEKIIERQGKDYPFLLENKDKLLSILTFKIPYYVGPLAKGSNSRFAWIKRATSSDILDDNDEDTRNGKIRPWNYQKLINMDETRDAFITNLIGNDIILLNEKVLPKRSLIYEEVMLQNELTRVKYKDKYGKAHFFDSELRQNIINGLFKNNSKRVNAKSLIKYLSDNHKDLNAIEIVSGVEKGKSFNSTLKTYNDLKTIFSEELLDSEIYQKELEEIIKVITVFDDKKSIKNYLTKFFGHLEILDEEKINQLSKLRYSGWGRYSAKLLLDIRDEDTGFNLLQFLRNDEENRNLTKLISDNTLSFEPKIKDIQSKSTIEDDIFDEIKKLAGSPAIKRGILNSIKIVDELVQIIGYPPHNIVIEMARENMTTEEGQKKAKTRKTKLESALKNIENSLLENGKVPHSDEQLQSEKLYLYYLQNGKDMYTLDKTGSPAPLYLDQLDQYEVDHIIPYSFLPIDSIDNKVLTHRENNQQKLNNIPDKETVANMKPFWEKLYNAKLISQTKYQRLTTSERTPDGVLTESMKAGFIERQLVETRQIIKHVARILDNRFSDTKIITLKSQLITNFRNTFHIAKIRELNDYHHAHDAYLAVVVGQTLLKVYPKLAPELIYGHHAHFNRHEENKATLRKHLYSNIMRFFNNPDSKVSKDIWDCNRDLPIIKDVIYNSQINFVKRTMIKKGAFYNQNPVGKFNKQLAANNRYPLKTKALCLDTSIYGGYGPMNSALSIIIIAERFNEKKGKIETVKEFHDIFIIDYEKFNNNPFQFLNDTSENGFLKKNNINRVLGFYRIPKYSLMQKIDGTRMLFESKSNLHKATQFKLTKTQNELFFHMKRLLTKSNLMDLKSKSAIKESQNFILKHKEEFDNISNQLSAFSQKMLGNTTSLKNLIKGYNERKIKEIDIRDETIKYFYDNFIKMFSFVKSGAPKDINDFFDNKCTVARMRPKPDKKLLNATLIHQSITGLYETRIDLSKLGED

SEQ ID NO: 322 - protein, 1338 aa, Coprococcus catus
MKQEYFLGLDMGTGSLGWAVTDSTYQVMRKHGKALWGTRLFESASTAEERRMFRTARRRLDRRNWRIQVLQEIFSEEISKVDPGFFLRMKESKYYPEDKRDAEGNCPELPYALFVDDNYTDKNYHKDYPTIYHLRKMLMETTEIPDIRLVYLVLHHMMKHRGHFLLSGDISQIKEFKSTFEQLIQNIQDEELEWHISLDDAAIQFVEHVLKDRNLTRSTKKSRLIKQLNAKSACEKAILNLLSGGTVKLSDIFNNKELDESERPKVSFADSGYDDYIGIVEAELAEQYYIIASAKAVYDWSVLVEILGNSVSISEAKIKVYQKHQADLKTLKKIVRQYMTKEDYKRVFVDTEEKLNNYSAYIGMTKKNGKKVDLKSKQCTQADFYDFLKKNVIKVIDHKEITQEIESEIEKENFLPKQVTKDNGVIPYQVHDYELKKILDNLGTRMPFIKENAEKIQQLFEFRIPYYVGPLNRVDDGKDGKFTWSVRKSDARIYPWNFTEVIDVEASAEKFIRRMTNKCTYLVGEDVLPKDSLVYSKFMVLNELNNLRLNGEKISVELKQRIYEELFCKYRKVTRKKLERYLVIEGIAKKGVEITGIDGDFKASLTAYHDFKERLTDVQLSQRAKEAIVLNVVLFGDDKKLLKQRLSKMYPNLTTGQLKGICSLSYQGWGRLSKTFLEEITVPAPGTGEVWNIMTALWQTNDNLMQLLSRNYGFTNEVEEFNTLKKETDLSYKTVDELYVSPAVKRQIWQTLKVVKEIQKVMGNAPKRVFVEMAREKQEGKRSDSRKKQLVELYRACKNEERDWITELNAQSDQQLRSDKLFLYYIQKGRCMYSGETIQLDELWDNTKYDIDHIYPQSKTMDDSLNNRVLVKKNYNAIKSDTYPLSLDIQKKMMSFWKMLQQQGFITKEKYVRLVRSDELSADELAGFIERQIVETRQSTKAVATILKEALPDTEIVYVKAGNVSNFRQTYELLKVREMNDLHHAKDAYLNIVVGNAYFVKFTKNAAWFIRNNPGRSYNLKRMFEFDIERSGEIAWKAGNKGSIVTVKKVMQKNNILVTRKAYEVKGGLFDQQIMKKGKGQVPIKGNDERLADIEKYGGYNKAAGTYFMLVKSLDKKGKEIRTIEFVPLYLKNQIEINHESAIQYLAQERGLNSPEILLSKIKIDTLFKVDGFKMWLSGRTGNQLIFKGANQLILSHQEAAILKGVVKYVNRKNENKDAKLSERDGMTEEKLLQLYDTFLDKLSNTVYSIRLSAQIKTLTEKRAKFIGLSNEDQCIVLNEILHMFQCQSGSANLKLIGGPGSAGILVMNNNITACKQISVINQSPTGIYEKEIDLIKL

SEQ ID NO: 323 - protein, 1345 aa, Streptococcus mutans
MKKPYSIGLDIGTNSVGWAVVTDDYKVPAKKMKVLGNTDKSHIEKNLLGALLFDSGNTAEDRRLKRTARRRYTRRRNRILYLQEIFSEEMGKVDDSFFHRLEDSFLVTEDKRGERHPIFGNLEEEVKYHENFPTIYHLRQYLADNPEKVDLRLVYLALAHIIKFRGHFLIEGKFDTRNNDVQRLFQEFLAVYDNTFENSSLQEQNVQVEEILTDKISKSAKKDRVLKLFPNEKSNGRFAEFLKLIVGNQADFKKHFELEEKAPLQFSKDTYEEELEVLLAQIGDNYAELFLSAKKLYDSILLSGILTVTDVGTKAPLSASMIQRYNEHQMDLAQLKQFIRQKLSDKYNEVFSDVSKDGYAGYIDGKTNQEAFYKYLKGLLNKIEGSGYFLDKIEREDFLRKQRTFDNGSIPHQIHLQEMRAIIRRQAEFYPFLADNQDRIEKLLTFRIPYYVGPLARGKSDFAWLSRKSADKITPWNFDEIVDKESSAEAFINRMTNYDLYLPNQKVLPKHSLLYEKFTVYNELTKVKYKTEQGKTAFFDANMKQEIFDGVFKVYRKVTKDKLMDFLEKEFDEFRIVDLTGLDKENKVFNASYGTYHDLCKILDKDFLDNSKNEKILEDIVLTLTLFEDREMIRKRLENYSDLLTKEQVKKLERRHYTGWGRLSAELIHGIRNKESRKTILDYLIDDGNSNRNFMQLINDDALSFKEEIAKAQVIGETDNLNQVVSDIAGSPAIKKGILQSLKIVDELVKIMGHQPENIVVEMARENQFTNQGRRNSQQRLKGLTDSIKEFGSQILKEHPVENSQLQNDRLFLYYLQNGRDMYTGEELDIDYLSQYDIDHIIPQAFIKDNSIDNRVLTSSKENRGKSDDVPSKDVVRKMKSYWSKLLSAKLITQRKFDNLTKAERGGLTDDDKAGFIKRQLVETRQITKHVARILDERFNTETDENNKKIRQVKIVTLKSNLVSNFRKEFELYKVREINDYHHAHDAYLNAVIGKALLGVYPQLEPEFVYGDYPHFHGHKENKATAKKFFYSNIMNFFKKDDVRTDKNGEIIWKKDEHISNIKKVLSYPQVNIVKKVEEQTGGFSKESILPKGNSDKLIPRKTKKFYWDTKKYGGFDSPIVAYSILVIADIEKGKSKKLKTVKALVGVTIMEKMTFERDPVAFLERKGYRNVQEENIIKLPKYSLFKLENGRKRLLASARELQKGNEIVLPNHLGTLLYHAKNIHKVDEPKHLDYVDKHKDEFKELLDVVSNFSKKYTLAEGNLEKIKELYAQNNGEDLKELASSFINLLTFTAIGAPATFKFFDKNIDRKRYTSTTEILNATLIHQSITGLYETRIDLNKLGGD

SEQ ID NO: 324 - protein, 1368 aa, Streptococcus pyogenes [sequence omitted]

SEQ ID NO: 325 - protein, 1388 aa, Streptococcus thermophilus
MTKPYSIGLDIGTNSVGWAVTTDNYKVPSKKMKVLGNTSKKYIKKNLLGVLLFDSGITAEGRRLKRTARRRYTRRRNRILYLQEIFSTEMATLDDAFFQRLDDSFLVPDDKRDSKYPIFGNLVEEKAYHDEFPTIYHLRKYLADSTKKADLRLVYLALAHMIKYRGHFLIEGEFNSKNNDIQKNFQDFLDTYNAIFESDLSLENSKQLEEIVKDKISKLEKKDRILKLFPGEKNSGIFSEFLKLIVGNQADFRKCFNLDEKASLHFSKESYDEDLETLLGYIGDDYSDVFLKAKKLYDAILLSGFLTVTDNETEAPLSSAMIKRYNEHKEDLALLKEYIRNISLKTYNEVFKDDTKNGYAGYIDGKTNQEDFYVYLKKLLAEFEGADYFLEKIDREDFLRKQRTFDNGSIPYQIHLQEMRAILDKQAKFYPFLAKNKERIEKILTFRIPYYVGPLARGNSDFAWSIRKRNEKITPWNFEDVIDKESSAEAFINRMTSFDLYLPEEKVLPKHSLLYETFNVYNELTKVRFIAESMRDYQFLDSKQKKDIVRLYFKDKRKVTDKDIIEYLHAIYGYDGIELKGIEKQFNSSLSTYHDLLNIINDKEFLDDSSNEAIIEEIIHTLTIFEDREMIKQRLSKFENIFDKSVLKKLSRRHYTGWGKLSAKLINGIRDEKSGNTILDYLIDDGISNRNFMQLIHDDALSFKKKIQKAQIIGDEDKGNIKEVVKSLPGSPAIKKGILQSIKIVDELVKVMGGRKPESIVVEMARENQYTNQGKSNSQQRLKRLEKSLKELGSKILKENIPAKLSKIDNNALQNDRLYLYYLQNGKDMYTGDDLDIDRLSNYDIDHIIPQAFLKDNSIDNKVLVSSASNRGKSDDVPSLEVVKKRKTFWYQLLKSKLISQRKFDNLTKAERGGLSPEDKAGFIQRQLVETRQITKHVARLLDEKFNNKKDENNRAVRTVKIITLKSTLVSQFRKDFELYKVREINDFHHAHDAYLNAVVASALLKKYPKLEPEFVYGDYPKYNSFRERKSATEKVYFYSNIMNIFKKSISLADGRVIERPLIEVNEETGESVWNKESDLATVRRVLSYPQVNVVKKVEEQNHGLDRGKPKGLFNANLSSKPKPNSNENLVGAKEYLDPKKYGGYAGISNSFTVLVKGTIEKGAKKKITNVLEFQGISILDRINYRKDKLNFLLEKGYKDIELIIELPKYSLFELSDGSRRMLASILSTNNKRGEIHKGNQIFLSQKFVKLLYHAKRISNTINENHRKYVENHKKEFEELFYYILEFNENYVGAKKNGKLLNSAFQSWQNHSIDELCSSFIGPTGSERKGLFELTSRGSAADFEFLGVKIPRYRDYTPSSLLKDATLIHQSVTGLYETRIDLAKLGEG

SEQ ID NO: 326 - protein, 1374 aa, Fusobacterium nucleatum
MKKQKFSDYYLGFDIGTNSVGWCVTDLDYNVLRFNKKDMWGSRLFDEAKTAAERRVQRNSRRRLKRRKWRLNLLEEIFSDEIMKIDSNFFRRLKESSLWLEDKNSKEKFTLFNDDNYKDYDFYKQYPTIFHLRDELIKNPEKKDIRLIYLALHSIFKSRGHFLFEGQNLKEIKNFETLYNNLISFLEDNGINKSIDKDNIEKLEKIICDSGKGLKDKEKEFKGIFNSDKQLVAIFKLSVGSSVSLNDLFDTDEYKKEEVEKEKISFREQIYEDDKPIYYSILGEKIELLDIAKSFYDFMVLNNILSDSNYISEAKVKLYEEHKKDLKNLKYIIRKYNKENYDKLFKDKNENNYPAYIGLNKEKDKKEVVEKSRLKIDDLIKVIKGYLPKPERIEEKDKTIFNEILNKIELKTILPKQRISDNGTLPYQIHEVELEKILENQSKYYDFLNYEENGVSTKDKLLKTFKFRIPYYVGPLNSYHKDKGGNSWIVRKEEGKILPWNFEQKVDIEKSAEEFIKRMTNKCTYLNGEDVIPKDSFLYSEYIILNELNKVQVNDEFLNEENKRKIIDELFKENKKVSEKKFKEYLLVNQIANRTVELKGIKDSFNSNYVSYIKFKDIFGEKLNLDIYKEISEKSILWKCLYGDDKKIFEKKIKNEYGDILNKDEIKKINSFKFNTWGRLSEKLLTGIEFINLETGECYSSVMEALRRTNYNLMELLSSKFTLQESIDNENKEMNEVSYRDLIEESYVSPSLKRAILQTLKIYEEIKKITGRVPKKVFIEMARGGDESMKNKKIPARQEQLKKLYDSCGNDIANFSIDIKEMKNSLSSYDNNSLRQKKLYLYYLQFGKCMYTGREIDLDRLLQNNDTYDIDHIYPRSKVIKDDSFDNLVLVLKNENAEKSNEYPVKKEIQEKMKSFWRFLKEKNFISDEKYKRLTGKDDFELRGFMARQLVNVRQTTKEVGKILQQIEPEIKIVYSKAEIASSFREMFDFIKVRELNDTHHAKDAYLNIVAGNVYNTKFTEKPYRYLQEIKENYDVKKIYNYDIKNAWDKENSLEIVKKNMEKNTVNITRFIKEEKGELFNLNPIKKGETSNEIISIKPKLYDGKDNKLNEKYGYYTSLKAAYFIYVEHEKKNKKVKTFERITRIDSTLIKNEKNLIKYLVSQKKLLNPKIIKKIYKEQTLIIDSYPYTFTGVDSNKKVELKNKKQLYLEKKYEQILKNALKFVEDNQGETEENYKFIYLKKRNNNEKNETIDAVKERYNIEFNEMYDKFLEKLSSKDYKNYINNKLYTNFLNSKEKFKKLKLWEKSLILREFLKIFNKNTYGKYEIKDSQTKEKLFSFPEDTGRIRLGQSSLGNNKELLEESVTGLFVKKIKL

SEQ ID NO: 327 - protein, 1333 aa, Planococcus antarcticus
MKNYTIGLDIGVASVGWVCIDENYKILNYNNRHAFGVHEFESAESAAGRRLKRGMRRRYNRRKKRLQLLQSLFDSYITDSGFFSKTDSQHFWKNNNEFENRSLTEVLSSLRISSRKYPTIYHLRSDLIESNKKMDLRLVYLALHNLVKYRGHFLQEGNWSEAASAEGMDDQLLELVTRYAELENLSPLDLSESQWKAAETLLLNRNLTKTDQSKELTAMFGKEYEPFCKLVAGLGVSLHQLFPSSEQALAYKETKTKVQLSNENVEEVMELLLEEESALLEAVQPFYQQVVLYELLKGETYVAKAKVSAFKQYQKDMASLKNLLDKTFGEKVYRSYFISDKNSQREYQKSHKVEVLCKLDQFNKEAKFAETFYKDLKKLLEDKSKTSIGTTEKDEMLRIIKAIDSNQFLQKQKGIQNAAIPHQNSLYEAEKILRNQQAHYPFITTEWIEKVKQILAFRIPYYIGPLVKDTTQSPFSWVERKGDAPITPWNFDEQIDKAASAEAFISRMRKTCTYLKGQEVLPKSSLTYERFEVLNELNGIQLRTTGAESDFRHRLSYEMKCWIIDNVFKQYKTVSTKRLLQELKKSPYADELYDEHTGEIKEVFGTQKENAFATSLSGYISMKSILGAVVDDNPAMTEELIYWIAVFEDREILHLKIQEKYPSITDVQRQKLALVKLPGWGRFSRLLIDGLPLDEQGQSVLDHMEQYSSVFMEVLKNKGFGLEKKIQKMNQHQVDGTKKIRYEDIEELAGSPALKRGIWRSVKIVEELVSIFGEPANIVLEVAREDGEKKRTKSRKDQWEELTKTTLKNDPDLKSFIGEIKSQGDQRFNEQRFWLYVTQQGKCLYTGKALDIQNLSMYEVDHILPQNFVKDDSLDNLALVMPEANQRKNQVGQNKMPLEIIEANQQYAMRTLWERLHELKLISSGKLGRLKKPSFDEVDKDKFIARQLVETRQIIKHVRDLLDERFSKSDIHLVKAGIVSKFRRFSEIPKIRDYNNKHHAMDALFAAALIQSILGKYGKNFLAFDLSKKDRQKQWRSVKGSNKEFFLFKNFGNLRLQSPVTGEEVSGVEYMKHVYFELPWQTTKMTQTGDGMFYKESIFSPKVKQAKYVSPKTEKFVHDEVKNHSICLVEFTFMKKEKEVQETKFIDLKVIEHHQFLKEPESQLAKFLAEKETNSPIIHARIIRTIPKYQKIWIEHFPYYFISTRELHNARQFEISYELMEKVKQLSERSSVEELKIVFGLLIDQMNDNYPIYTKSSIQDRVQKFVDTQLYDFKSFEIGFEELKKAVAANAQRSDTFGSRISKKPKPEEVAIGYESITGLKYRKPRSVVGTKR

SEQ ID NO: 328 - protein, 1395 aa, Treponema denticola
MKKEIKDYFLGLDVGTGSVGWAVTDTDYKLLKANRKDLWGMRCFETAETAEVRRLHRGARRRIERRKKRIKLLQELFSQEIAKTDEGFFQRMKESPFYAEDKTILQENTLFNDKDFADKTYHKAYPTINHLIKAWIENKVKPDPRLLYLACHNIIKKRGHFLFEGDFDSENQFDTSIQALFEYLREDMEVDIDADSQKVKEILKDSSLKNSEKQSRLNKILGLKPSDKQKKAITNLISGNKINFADLYDNPDLKDAEKNSISFSKDDFDALSDDLASILGDSFELLLKAKAVYNCSVLSKVIGDEQYLSFAKVKIYEKHKTDLTKLKNVIKKHFPKDYKKVFGYNKNEKNNNNYSGYVGVCKTKSKKLIINNSVNQEDFYKFLKTILSAKSEIKEVNDILTEIETGTFLPKQISKSNAEIPYQLRKMELEKILSNAEKHFSFLKQKDEKGLSHSEKIIMLLTFKIPYYIGPINDNHKKFFPDRCWVVKKEKSPSGKTTPWNFFDHIDKEKTAEAFITSRTNFCTYLVGESVLPKSSLLYSEYTVLNEINNLQIIIDGKNICDIKLKQKIYEDLFKKYKKITQKQISTFIKHEGICNKTDEVIILGIDKECTSSLKSYIELKNIFGKQVDEISTKNMLEEIIRWATIYDEGEGKTILKTKIKAEYGKYCSDEQIKKILNLKFSGWGRLSRKFLETVTSEMPGFSEPVNIITAMRETQNNLMELLSSEFTFTENIKKINSGFEDAEKQFSYDGLVKPLFLSPSVKKMLWQTLKLVKEISHITQAPPKKIFIEMAKGAELEPARTKTRLKILQDLYNNCKNDADAFSSEIKDLSGKIENEDNLRLRSDKLYLYYTQLGKCMYCGKPIEIGHVFDTSNYDIDHIYPQSKIKDDSISNRVLVCSSCNKNKEDKYPLKSEIQSKQRGFWNFLQRNNFISLEKLNRLTRATPISDDETAKFIARQLVETRQATKVAAKVLEKMFPETKIVYSKAETVSMFRNKFDIVKCREINDFHHAHDAYLNIVVGNVYNTKFTNNPWNFIKEKRDNPKIADTYNYYKVFDYDVKRNNITAWEKGKTIITVKDMLKRNTPIYTRQAACKKGELFNQTIMKKGLGQHPLKKEGPFSNISKYGGYNKVSAAYYTLIEYEEKGNKIRSLETIPLYLVKDIQKDQDVLKSYLTDLLGKKEFKILVPKIKINSLLKINGFPCHITGKTNDSFLLRPAVQFCCSNNEVLYFKKIIRFSEIRSQREKIGKTISPYEDLSFRSYIKENLWKKTKNDEIGEKEFYDLLQKKNLEIYDMLLTKHKDTIYKKRPNSATIDILVKGKEKFKSLIIENQFEVILEILKLFSATRNVSDLQHIGGSKYSGVAKIGNKISSLDNCILIYQSITGIFEKRIDLLKV

SEQ ID NO: 329 - protein, 1327 aa, Solobacterium moorei
MEGQMKNNGNNLQQGNYYLGLDVGTSSVGWAVTDTDYNVLKFRGKSMWGARLFDEASTAEERRTHRGNRRRLARRKYRLLLLEQLFEKEIRKIDDNFFVRLHESNLWADDKSKPSKFLLFNDTNFTDKDYLKKYPTIYHLRSDLIHNSTEHDIRLVFLALHHLIKYRGHFIYDNSANGDVKTLDEAVSDFEEYLNENDIEFNIENKKEFINVLSDKHLTKKEKKISLKKLYGDITDSENINISVLIEMLSGSSISLSNLFKDIEFDGKQNLSLDSDIEETLNDVVDILGDNIDLLIHAKEVYDIAVLTSSLGKHKYLCDAKVELFEKNKKDLMILKKYIKKNHPEDYKKIFSSPTEKKNYAAYSQTNSKNVCSQEEFCLFIKPYIRDMVKSENEDEVRIAKEVEDKSFLTKLKGTNNSVVPYQIHERELNQILKNIVAYLPFMNDEQEDISVVDKIKLIFKFKIPYYVGPLNTKSTRSWVYRSDEKIYPWNFSNVIDLDKTAHEFMNRLIGRCTYTNDPVLPMDSLLYSKYNVLNEINPIKVNGKAIPVEVKQAIYTDLFENSKKKVTRKSIYIYLLKNGYIEKEDIVSGIDIEIKSKLKSHHDFTQIVQENKCTPEEIERIIKGILVYSDDKSMLRRWLKNNIKGLSENDVKYLAKLNYKEWGRLSKTLLTDIYTINPEDGEACSILDIMWNTNATLMEILSNEKYQFKQNIENYKAENYDEKQNLHEELDDMYISPAARRSIWQALRIVDEIVDIKKSAPKKIFIEMAREKKSAMKKKRTESRKDTLLELYKSCKSQADGFYDEELFEKLSNESNSRLRRDQLYLYYTQMGRSMYTGKRIDFDKLINDKNTYDIDHIYPRSKIKDDSITNRVLVEKDINGEKTDIYPISEDIRQKMQPFWKILKEKGLINEEKYKRLTRNYELTDEELSSFVARQLVETQQSTKALATLLKKEYPSAKIVYSKAGNVSEFRNRKDKELPKFREINDLHHAKDAYLNIVVGNVYDTKFTEKFFNNIRNENYSLKRVFDFSVPGAWDAKGSTFNTIKKYMAKNNPIIAFAPYEVKGELFDQQIVPKGKGQFPIKQGKDIEKYGGYNKLSSAFLFAVEYKGKKARERSLETVYIKDVELYLQDPIKYCESVLGLKEPQIIKPKILMGSLFSINNKKLVVTGRSGKQYVCHHIYQLSINDEDSQYLKNIAKYLQEEPDGNIERQNILNITSVNNIKLFDVLCTKFNSNTYEIILNSLKNDVNEGREKFSELDILEQCNILLQLLKAFKCNRESSNLEKLNNKKQAGVIVIPHLFTKCSVFKVIHQSITGLFEKEMDLLK

SEQ ID NO: 330 - protein, 1334 aa, Staphylococcus pseudintermedius
MGRKPYILSLDIGTGSVGYACMDKGFNVLKYHDKDALGVYLFDGALTAQERRQFRTSRRRKNRRIKRLGLLQELLAPLVQNPNFYQFQRQFAWKNDNMDFKNKSLSEVLSFLGYESKKYPTIYHLQEALLLKDEKFDPELIYMALYHLVKYRGHFLFDHLKIENLTNNDNMHDFVELIETYENLNNIKLNLDYEKTKVIYEILKDNEMTKNDRAKRVKNMEKKLEQFSIMLLGLKFNEGKLFNHADNAEELKGANQSHTFADNYEENLTPFLTVEQSEFIERANKIYLSLTLQDILKGKKSMAMSKVAAYDKFRNELKQVKDIVYKADSTRTQFKKIFVSSKKSLKQYDATPNDQTFSSLCLFDQYLIRPKKQYSLLIKELKKIIPQDSELYFEAENDTLLKVLNTTDNASIPMQINLYEAETILRNQQKYHAEITDEMIEKVLSLIQFRIPYYVGPLVNDHTASKFGWMERKSNESIKPWNFDEVVDRSKSATQFIRRMTNKCSYLINEDVLPKNSLLYQEMEVLNELNATQIRLQTDPKNRKYRMMPQIKLFAVEHIFKKYKTVSHSKFLEIMLNSNHRENFMNHGEKLSIFGTQDDKKFASKLSSYQDMTKIFGDIEGKRAQIEEIIQWITIFEDKKILVQKLKECYPELTSKQINQLKKLNYSGWGRLSEKLLTHAYQGHSIIELLRHSDENFMEILTNDVYGFQNFIKEENQVQSNKIQHQDIANLTTSPALKKGIWSTIKLVRELTSIFGEPEKIIMEFATEDQQKGKKQKSRKQLWDDNIKKNKLKSVDEYKYIIDVANKLNNEQLQQEKLWLYLSQNGKCMYSGQSIDLDALLSPNATKHYEVDHIFPRSFIKDDSIDNKVLVIKKMNQTKGDQVPLQFIQQPYERIAYWKSLNKAGLISDSKLHKLMKPEFTAMDKEGFIQRQLVETRQISVHVRDFLKEEYPNTKVIPMKAKMVSEFRKKFDIPKIRQMNDAHHAIDAYLNGVVYHGAQLAYPNVDLFDFNFKWEKVREKWKALGEFNTKQKSRELFFFKKLEKMEVSQGERLISKIKLDMNHFKINYSRKLANIPQQFYNQTAVSPKTAELKYESNKSNEVVYKGLTPYQTYVVAIKSVNKKGKEKMEYQMIDHYVFDFYKFQNGNEKELALYLAQRENKDEVLDAQIVYSLNKGDLLYINNHPCYFVSRKEVINAKQFELTVEQQLSLYNVMNNKETNVEKLLIEYDFIAEKVINEYHHYLNSKLKEKRVRTFFSESNQTHEDFIKALDELFKVVTASATRSDKIGSRKNSMTHRAFLGKGKDVKIAYTSISGLKTTKPKSLFKLAESRNEL

SEQ ID NO: 331 - protein, 1472 aa, Flavobacterium branchiophilum
MAKILGLDLGTNSIGWAVVERENIDFSLIDKGVRIFSEGVKSEKGIESSRAAERTGYRSARKIKYRRKLRKYETLKVLSLNRMCPLSIEEVEEWKKSGFKDYPLNPEFLKWLSTDEESNVNPYFFRDRASKHKVSLFELGRAFYHIAQRRGFLSNRLDQSAEGILEEHCPKIEAIVEDLISIDEISTNITDYFFETGILDSNEKNGYAKDLDEGDKKLVSLYKSLLAILKKNESDFENCKSEIIERLNKKDVLGKVKGKIKDISQAMLDGNYKTLGQYFYSLYSKEKIRNQYTSREEHYLSEFITICKVQGIDQINEEEKINEKKFDGLAKDLYKAIFFQRPLKSQKGLIGKCSFEKSKSRCAISHPDFEEYRMWTYLNTIKIGTQSDKKLRFLTQDEKLKLVPKFYRKNDFNFDVLAKELIEKGSSFGFYKSSKKNDFFYWFNYKPTDTVAACQVAASLKNAIGEDWKTKSFKYQTINSNKEQVSRTVDYKDLWHLLTVATSDVYLYEFAIDKLGLDEKNAKAFSKTKLKKDFASLSLSAINKILPYLKEGLLYSHAVFVANIENIVDENIWKDEKQRDYIKTQISEIIENYTLEKSRFEIINGLLKEYKSENEDGKRVYYSKEAEQSFENDLKKKLVLFYKSNEIENKEQQETIFNELLPIFIQQLKDYEFIKIQRLDQKVLIFLKGKNETGQIFCTEEKGTAEEKEKKIKNRLKKLYHPSDIEKFKKKIIKDEFGNEKIVLGSPLTPSIKNPMAMRALHQLRKVLNALILEGQIDEKTIIHIEMARELNDANKRKGIQDYQNDNKKFREDAIKEIKKLYFEDCKKEVEPTEDDILRYQLWMEQNRSEIYEEGKNISICDIIGSNPAYDIEHTIPRSRSQDNSQMNKTLCSQRFNREVKKQSMPIELNNHLEILPRIAHWKEEADNLTREIEIISRSIKAAATKEIKDKKIRRRHYLTLKRDYLQGKYDRFIWEEPKVGFKNSQIPDTGIITKYAQAYLKSYFKKVESVKGGMVAEFRKIWGIQESFIDENGMKHYKVKDRSKHTHHTIDAITIACMTKEKYDVLAHAWTLEDQQNKKEARSIIEASKPWKTFKEDLLKIEEEILVSHYTPDNVKKQAKKIVRVRGKKQFVAEVERDVNGKAVPKKAASGKTIYKLDGEGKKLPRLQQGDTIRGSLHQDSIYGAIKNPLNTDEIKYVIRKDLESIKGSDVESIVDEVVKEKIKEAIANKVLLLSSNAQQKNKLVGTVWMNEEKRIAINKVRIYANSVKNPLHIKEHSLLSKSKHVHKQKVYGQNDENYAMAIYELDGKRDFELINIFNLAKLIKQGQGFYPLHKKKEIKGKIVFVPIEKRNKRDVVLKRGQQVVFYDKEVENPKDISEIVDFKGRIYIIEGLSIQRIVRPSGKVDEYGVIMLRYFKEARKADDIKQDNFKPDGVFKLGENKPTRKMNHQFTAFVEGIDFKVLPSGKFEKI

SEQ ID NO: 332 - protein, 1688 aa, Ignavibacterium album
MEFKKVLGLDIGTNSIGCALLSLPKSIQDYGKGGRLEWLTSRVIPLDADYMKAFIDGKNGLPQVITPAGKRRQKRGSRRLKHRYKLRRSRLIRVFKTLNWLPEDFPLDNPKRIKETISTEGKFSFRISDYVPISDESYREFYREFGYPENEIEQVIEEINFRRKTKGKNKNPMIKLLPEDWVVYYLRKKALIKPTTKEELIRIIYLFNQRRGFKSSRKDLTETAILDYDEFAKRLAEKEKYSAENYETKFVSITKVKEVVELKTDGRKGKKRFKVILEDSRIEPYEIERKEKPDWEGKEYTFLVTQKLEKGKFKQNKPDLPKEEDWALCTTALDNRMGSKHPGEFFFDELLKAFKEKRGYKIRQYPVNRWRYKKELEFIWTKQCQLNPELNNLNINKEILRKLATVLYPSQSKFFGPKIKEFENSDVLHIISEDIIYYQRDLKSQKSLISECRYEKRKGIDGEIYGLKCIPKSSPLYQEFRIWQDIHNIKVIRKESEVNGKKKINIDETQLYINENIKEKLFELFNSKDSLSEKDILELISLNIINSGIKISKKEEETTHRINLFANRKELKGNETKSRYRKVFKKLGFDGEYILNHPSKLNRLWHSDYSNDYADKEKTEKSILSSLGWKNRNGKWEKSKNYDVFNLPLEVAKAIANLPPLKKEYGSYSALAIRKMLVVMRDGKYWQHPDQIAKDQENTSLMLFDKNLIQLTNNQRKVLNKYLLTLAEVQKRSTLIKQKLNEIEHNPYKLELVSDQDLEKQVLKSFLEKKNESDYLKGLKTYQAGYLIYGKHSEKDVPIVNSPDELGEYIRKKLPNNSLRNPIVEQVIRETIFIVRDVWKSFGIIDEIHIELGRELKNNSEERKKTSESQEKNFQEKERARKLLKELLNSSNFEHYDENGNKIFSSFTVNPNPDSPLDIEKFRIWKNQSGLTDEELNKKLKDEKIPTEIEVKKYILWLTQKCRSPYTGKIIPLSKLFDSNVYEIEHIIPRSKMKNDSTNNLVICELGVNKAKGDRLAANFISESNGKCKFGEVEYTLLKYGDYLQYCKDTFKYQKAKYKNLLATEPPEDFIERQINDTRYIGRKLAELLTPVVKDSKNIIFTIGSITSELKITWGLNGVWKDILRPRFKRLESIINKKLIFQDEDDPNKYHFDLSINPQLDKEGLKRLDHRHHALDATIIAATTREHVRYLNSLNAADNDEEKREYFLSLCNHKIRDFKLPWENFTSEVKSKLLSCVVSYKESKPILSDPFNKYLKWEYKNGKWQKVFAIQIKNDRWKAVRRSMFKEPIGTVWIKKIKEVSLKEAIKIQAIWEEVKNDPVRKKKEKYIYDDYAQKVIAKIVQELGLSSSMRKQDDEKLNKFINEAKVSAGVNKNLNTTNKTIYNLEGRFYEKIKVAEYVLYKAKRMPLNKKEYIEKLSLQKMFNDLPNFILEKSILDNYPEILKELESDNKYIIEPHKKNNPVNRLLLEHILEYHNNPKEAFSTEGLEKLNKKAINKIGKPIKYITRLDGDINEEEIFRGAVFETDKGSNVYFVMYENNQTKDREFLKPNPSISVLKAIEHKNKIDFFAPNRLGFSRIILSPGDLVYVPTNDQYVLIKDNSSNETIINWDDNEFISNRIYQVKKFTGNSCYFLKNDIASLILSYSASNGVGEFGSQNISEYSVDDPPIRIKDVCIKIRVDRLGNVRPL

SEQ ID NO: 333 - protein, 1415 aa, Bergeyella zoohelcum
MKHILGLDLGTNSIGWALIERNIEEKYGKIIGMGSRIVPMGAELSKFEQGQAQTKNADRRTNRGARRLNKRYKQRRNKLIYILQKLDMLPSQIKLKEDFSDPNKIDKITILPISKKQEQLTAFDLVSLRVKALTEKVGLEDLGKIIYKYNQLRGYAGGSLEPEKEDIFDEEQSKDKKNKSFIAFSKIVFLGEPQEEIFKNKKLNRRAIIVETEEGNFEGSTFLENIKVGDSLELLINISASKSGDTITIKLPNKTNWRKKMENIENQLKEKSKEMGREFYISEFLLELLKENRWAKIRNNTILRARYESEFEAIWNEQVKHYPFLENLDKKTLIEIVSFIFPGEKESQKKYRELGLEKGLKYIIKNQVVFYQRELKDQSHLISDCRYEPNEKAIAKSHPVFQEYKVWEQINKLIVNTKIEAGTNRKGEKKYKYIDRPIPTALKEWIFEELQNKKEITFSAIFKKLKAEFDLREGIDFLNGMSPKDKLKGNETKLQLQKSLGELWDVLGLDSINRQIELWNILYNEKGNEYDLTSDRTSKVLEFINKYGNNIVDDNAEETAIRISKIKFARAYSSLSLKAVERILPLVRAGKYFNNDFSQQLQSKILKLLNENVEDPFAKAAQTYLDNNQSVLSEGGVGNSIATILVYDKHTAKEYSHDELYKSYKEINLLKQGDLRNPLVEQIINEALVLIRDIWKNYGIKPNEIRVELARDLKNSAKERATIHKRNKDNQTINNKIKETLVKNKKELSLANIEKVKLWEAQRHLSPYTGQPIPLSDLFDKEKYDVDHIIPISRYFDDSFTNKVISEKSVNQEKANRTAMEYFEVGSLKYSIFTKEQFIAHVNEYFSGVKRKNLLATSIPEDPVQRQIKDTQYIAIRVKEELNKIVGNENVKTTTGSITDYLRNHWGLTDKFKLLLKERYEALLESEKFLEAEYDNYKKDFDSRKKEYEEKEVLFEEQELTREEFIKEYKENYIRYKKNKLIIKGWSKRIDHRHHAIDALIVACTEPAHIKRLNDLNKVLQDWLVEHKSEFMPNFEGSNSELLEEILSLPENERTEIFTQIEKFRAIEMPWKGFPEQVEQKLKEIIISHKPKDKLLLQYNKAGDRQIKLRGQLHEGTLYGISQGKEAYRIPLTKFGGSKFATEKNIQKIVSPFLSGFIANHLKEYNNKKEEAFSAEGIMDLNNKLAQYRNEKGELKPHTPISTVKIYYKDPSKNKKKKDEEDLSLQKLDREKAFNEKLYVKTGDNYLFAVLEGEIKTKKTSQIKRLYDIISFFDATNFLKEEFRNAPDKKTFDKDLLFRQYFEERNKAKLLFTLKQGDFVYLPNENEEVILDKESPLYNQYWGDLKERGKNIYVVQKFSKKQIYFIKHTIADIIKKDVEFGSQNCYETVEGRSIKENCFKLEIDRLGNIVKVIKR

SEQ ID NO: 334 - protein, 1166 aa, Nitrobacter hamburgensis
MHVEIDFPHFSRGDSHLAMNKNEILRGSSVLYRLGLDLGSNSLGWFVTHLEKRGDRHEPVALGPGGVRIFPDGRDPQSGTSNAVDRRMARGARKRRDRFVERRKELIAALIKYNLLPDDARERRALEVLDPYALRKTALTDTLPAHHVGRALFHLNQRRGFQSNRKTDSKQSEDGAIKQAASRLATDKGNETLGVFFADMHLRKSYEDRQTAIRAELVRLGKDHLTGNARKKIWAKVRKRLFGDEVLPRADAPHGVRARATITGTKASYDYYPTRDMLRDEFNAIWAGQSAHHATITDEARTEIEHIIFYQRPLKPAIVGKCTLDPATRPFKEDPEGYRAPWSHPLAQRFRILSEARNLEIRDTGKGSRRLTKEQSDLVVAALLANREVKFDKLRTLLKLPAEARFNLESDRRAALDGDQTAARLSDKKGFNKAWRGFPPERQIAIVARLEETEDENELIAWLEKECALDGAAAARVANTTLPDGHCRLGLRAIKKIVPIMQDGLDEDGVAGAGYHIAAKRAGYDHAKLPTGEQLGRLPYYGQWLQDAVVGSGDARDQKEKQYGQFPNPTVHIGLGQLRRVVNDLIDKYGPPTEISIEFTRALKLSEQQKAERQREQRRNQDKNKARAEELAKFGRPANPRNLLKMRLWEELAHDPLDRKCVYTGEQISIERLLSDEVDIDHILPVAMTLDDSPANKIICMRYANRHKRKQTPSEAFGSSPTLQGHRYNWDDIAARATGLPRNKRWRFDANAREEFDKRGGFLARQLNETGWLARLAKQYLGAVTDPNQIWVVPGRLTSMLRGKWGLNGLLPSDNYAGVQDKAEEFLASTDDMEFSGVKNRADHRHHAIDGLVTALTDRSLLWKMANAYDEEHEKFVIEPPWPTMRDDLKAALEKMVVSHKPDHGIEGKLHEDSAYGFVKPLDATGLKEEEAGNLVYRKAIESLNENEVDRIRDIQLRTIVRDHVNVEKTKGVALADALRQLQAPSDDYPQFKHGLRHVRILKKEKGDYLVPIANRASGVAYKAYSAGENFCVEVFETAGGKWDGEAVRRFDANKKNAGPKIAHAPQWRDANEGAKLVMRIHKGDLIRLDHEGRARIMVVHRLDAAAGRFKLADHNETGNLDKRHATNNDIDPFRWLMASYNTLKKLAAVPVRVDELGRVWRVMPN

SEQ ID NO: 335 - protein, 1498 aa, Odoribacter laneus
METTLGIDLGTNSIGLALVDQEEHQILYSGVRIFPEGINKDTIGLGEKEESRNATRRAKRQMRRQYFRKKLRKAKLLELLIAYDMCPLKPEDVRRWKNWDKQQKSTVRQFPDTPAFREWLKQNPYELRKQAVTEDVTRPELGRILYQMIQRRGFLSSRKGKEEGKIFTGKDRMVGIDETRKNLQKQTLGAYLYDIAPKNGEKYRFRTERVRARYTLRDMYIREFEIIWQRQAGHLGLAHEQATRKKNIFLEGSATNVRNSKLITHLQAKYGRGHVLIEDTRITVTFQLPLKEVLGGKIEIEEEQLKFKSNESVLFWQRPLRSQKSLLSKCVFEGRNFYDPVHQKWIIAGPTPAPLSHPEFEEFRAYQFINNIIYGKNEHLTAIQREAVFELMCTESKDFNFEKIPKHLKLFEKFNFDDTTKVPACTTISQLRKLFPHPVWEEKREEIWHCFYFYDDNTLLFEKLQKDYALQTNDLEKIKKIRLSESYGNVSLKAIRRINPYLKKGYAYSTAVLLGGIRNSFGKRFEYFKEYEPEIEKAVCRILKEKNAEGEVIRKIKDYLVHNRFGFAKNDRAFQKLYHHSQAITTQAQKERLPETGNLRNPIVQQGLNELRRTVNKLLATCREKYGPSFKFDHIHVEMGRELRSSKTEREKQSRQIRENEKKNEAAKVKLAEYGLKAYRDNIQKYLLYKEIEEKGGTVCCPYTGKTLNISHTLGSDNSVQIEHIIPYSISLDDSLANKTLCDATFNREKGELTPYDFYQKDPSPEKWGASSWEEIEDRAFRLLPYAKAQRFIRRKPQESNEFISRQLNDTRYISKKAVEYLSAICSDVKAFPGQLTAELRHLWGLNNILQSAPDITFPLPVSATENHREYYVITNEQNEVIRLFPKQGETPRTEKGELLLTGEVERKVFRCKGMQEFQTDVSDGKYWRRIKLSSSVTWSPLFAPKPISADGQIVLKGRIEKGVFVCNQLKQKLKTGLPDGSYWISLPVISQTFKEGESVNNSKLTSQQVQLFGRVREGIFRCHNYQCPASGADGNFWCTLDTDTAQPAFTPIKNAPPGVGGGQIILTGDVDDKGIFHADDDLHYELPASLPKGKYYGIFTVESCDPTLIPIELSAPKTSKGENLIEGNIWVDEHTGEVRFDPKKNREDQRHHAIDAIVIALSSQSLFQRLSTYNARRENKKRGLDSTEHFPSPWPGFAQDVRQSVVPLLVSYKQNPKTLCKISKTLYKDGKKIHSCGNAVRGQLHKETVYGQRTAPGATEKSYHIRKDIRELKTSKHIGKVVDITIRQMLLKHLQENYHIDITQEFNIPSNAFFKEGVYRIFLPNKHGEPVPIKKIRMKEELGNAERLKDNINQYVNPRNNHHVMIYQDADGNLKEEIVSFWSVIERQNQGQPIYQLPREGRNIVSILQINDTFLIGLKEEEPEVYRNDLSTLSKHLYRVQKLSGMYYTFRHHLASTLNNEREEFRIQSLEAWKRANPVKVQIDEIGRITFLNGPLC

SEQ ID NO: 336 - protein, 1372 aa, Legionella pneumophila
MESSQILSPIGIDLGGKFTGVCLSHLEAFAELPNHANTKYSVILIDHNNFQLSQAQRRATRHRVRNKKRNQFVKRVALQLFQHILSRDLNAKEETALCHYLNNRGYTYVDTDLDEYIKDETTINLLKELLPSESEHNFIDWFLQKMQSSEFRKILVSKVEEKKDDKELKNAVKNIKNFITGFEKNSVEGHRHRKVYFENIKSDITKDNQLDSIKKKIPSVCLSNLLGHLSNLQWKNLHRYLAKNPKQFDEQTFGNEFLRMLKNFRHLKGSQESLAVRNLIQQLEQSQDYISILEKTPPEITIPPYEARTNTGMEKDQSLLLNPEKLNNLYPNWRNLIPGIIDAHPFLEKDLEHTKLRDRKRIISPSKQDEKRDSYILQRYLDLNKKIDKFKIKKQLSFLGQGKQLPANLIETQKEMETHFNSSLVSVLIQIASAYNKEREDAAQGIWFDNAFSLCELSNINPPRKQKILPLLVGAILSEDFINNKDKWAKFKIFWNTHKIGRTSLKSKCKEIEEARKNSGNAFKIDYEEALNHPEHSNNKALIKIIQTIPDIIQAIQSHLGHNDSQALIYHNPFSLSQLYTILETKRDGFHKNCVAVTCENYWRSQKTEIDPEISYASRLPADSVRPFDGVLARMMQRLAYEIAMAKWEQIKHIPDNSSLLIPIYLEQNRFEFEESFKKIKGSSSDKTLEQAIEKQNIQWEEKFQRIINASMNICPYKGASIGGQGEIDHIYPRSLSKKHFGVIFNSEVNLIYCSSQGNREKKEEHYLLEHLSPLYLKHQFGTDNVSDIKNFISQNVANIKKYISFHLLTPEQQKAARHALFLDYDDEAFKTITKFLMSQQKARVNGTQKFLGKQIMEFLSTLADSKQLQLEFSIKQITAEEVHDHRELLSKQEPKLVKSRQQSFPSHAIDATLTMSIGLKEFPQFSQELDNSWFINHLMPDEVHLNPVRSKEKYNKPNISSTPLFKDSLYAERFIPVWVKGETFAIGFSEKDLFEIKPSNKEKLFTLLKTYSTKNPGESLQELQAKSKAKWLYFPINKTLALEFLHHYFHKEIVTPDDTTVCHFINSLRYYTKKESITVKILKEPMPVLSVKFESSKKNVLGSFKHTIALPATKDWERLFNHPNFLALKANPAPNPKEFNEFIRKYFLSDNNPNSDIPNNGHNIKPQKHKAVRKVFSLPVIPGNAGTMMRIRRKDNKGQPLYQLQTIDDTPSMGIQINEDRLVKQEVLMDAYKTRNLSTIDGINNSEGQAYATFDNWLTLPVSTFKPEIIKLEMKPHSKTRRYIRITQSLADFIKTIDEALMIKPSDSIDDPLNMPNEIVCKNKLFGNELKPRDGKMKIVSTGKIVTYEFESDSTPQWIQTLYVTQLKKQP

SEQ ID NO: 337 - protein, 1517 aa, Bacteroides sp.
MKKIVGLDLGTNSIGWALINAYINKEHLYGIEACGSRIIPMDAAILGNFDKGNSISQTADRTSYRGIRRLRERHLLRRERLHRILDLLGFLPKHYSDSLNRYGKFLNDIECKLPWVKDETGSYKFIFQESFKEMLANFTEHHPILIANNKKVPYDWTIYYLRKKALTQKISKEELAWILLNFNQKRGYYQLRGEEEETPNKLVEYYSLKVEKVEDSGERKGKDTWYNVHLENGMIYRRTSNIPLDWEGKTKEFIVTTDLEADGSPKKDKEGNIKRSFRAPKDDDWTLIKKKTEADIDKIKMTVGAYIYDTLLQKPDQKIRGKLVRTIERKYYKNELYQILKTQSEFHEELRDKQLYIACLNELYPNNEPRRNSISTRDFCHLFIEDIIFYQRPLKSKKSLIDNCPYEENRYIDKESGEIKHASIKCIAKSHPLYQEFRLWQFIVNLRIYRKETDVDVTQELLPTEADYVTLFEWLNEKKEIDQKAFFKYPPFGFKKTTSNYRWNYVEDKPYPCNETHAQIIARLGKAHIPKAFLSKEKEETLWHILYSIEDKQEIEKALHSFANKNNLSEEFIEQFKNFPPFKKEYGSYSAKAIKKLLPLMRMGKYWSIENIDNGTRIRINKIIDGEYDENIRERVRQKAINLTDITHFRALPLWLACYLVYDRHSEVKDIVKWKTPKDIDLYLKSFKQHSLRNPIVEQVITETLRTVRDIWQQVGHIDEIHIELGREMKNPADKRARMSQQMIKNENTNLRIKALLTEFLNPEFGIENVRPYSPSQQDLLRIYEEGVLNSILELPEDIGIILGKFNQTDTLKRPTRSEILRYKLWLEQKYRSPYTGEMIPLSKLFTPAYEIEHIIPQSRYFDDSLSNKVICESEINKLKDRSLGYEFIKNHHGEKVELAFDKPVEVLSVEAYEKLVHESYSHNRSKMKKLLMEDIPDQFIERQLNDSRYISKVVKSLLSNIVREENEQEAISKNVIPCTGGITDRLKKDWGINDVWNKIVLPRFIRLNELTESTRFTSINTNNTMIPSMPLELQKGFNKKRIDHRHHAMDAIIIACANRNIVNYLNNVSASKNTKITRRDLQTLLCHKDKTDNNGNYKWVIDKPWETFTQDTLTALQKITVSFKQNLRVINKTTNHYQHYENGKKIVSNQSKGDSWAIRKSMHKETVHGEVNLRMIKTVSFNEALKKPQAIVEMDLKKKILAMLELGYDTKRIKNYFEENKDTWQDINPSKIKVYYFTKETKDRYFAVRKPIDTSFDKKKIKESITDTGIQQIMLRHLETKDNDPTLAFSPDGIDEMNRNILILNKGKKHQPIYKVRVYEKAEKFTVGQKGNKRTKFVEAAKGTNLFFAIYETEEIDKDTKKVIRKRSYSTIPLNVVIERQKQGLSSAPEDENGNLPKYILSPNDLVYVPTQEEINKGEVVMPIDRDRIYKMVDSSGITANFIPASTANLIFALPKATAEIYCNGENCIQNEYGIGSPQSKNQKAITGEMVKEICFPIKVDRLGNIIQVGSCILTN

SEQ ID NO: 338 - protein, 1101 aa, Akkermansia muciniphila
MSRSLTFSFDIGYASIGWAVIASASHDDADPSVCGCGTVLFPKDDCQAFKRREYRRLRRNIRSRRVRIERIGRLLVQAQIITPEMKETSGHPAPFYLASEALKGHRTLAPIELWHVLRWYAHNRGYDNNASWSNSLSEDGGNGEDTERVKHAQDLMDKHGTATMAETICRELKLEEGKADAPMEVSTPAYKNLNTAFPRLIVEKEVRRILELSAPLIPGLTAEIIELIAQHHPLTTEQRGVLLQHGIKLARRYRGSLLFGQLIPRFDNRIISRCPVTWAQVYEAELKKGNSEQSARERAEKLSKVPTANCPEFYEYRMARILCNIRADGEPLSAEIRRELMNQARQEGKLTKASLEKAISSRLGKETETNVSNYFTLHPDSEEALYLNPAVEVLQRSGIGQILSPSVYRIAANRLRRGKSVTPNYLLNLLKSRGESGEALEKKIEKESKKKEADYADTPLKPKYATGRAPYARTVLKKVVEEILDGEDPTRPARGEAHPDGELKAHDGCLYCLLDTDSSVNQHQKERRLDTMTNNHLVRHRMLILDRLLKDLIQDFADGQKDRISRVCVEVGKELTTFSAMDSKKIQRELTLRQKSHTDAVNRLKRKLPGKALSANLIRKCRIAMDMNWTCPFTGATYGDHELENLELEHIVPHSFRQSNALSSLVLTWPGVNRMKGQRTGYDFVEQEQENPVPDKPNLHICSLNNYRELVEKLDDKKGHEDDRRRKKKRKALLMVRGLSHKHQSQNHEAMKEIGMTEGMMTQSSHLMKLACKSIKTSLPDAHIDMIPGAVTAEVRKAWDVFGVFKELCPEAADPDSGKILKENLRSLTHLHHALDACVLGLIPYIIPAHHNGLLRRVLAMRRIPEKLIPQVRPVANQRHYVLNDDGRMMLRDLSASLKENIREQLMEQRVIQHVPADMGGALLKETMQRVLSVDGSGEDAMVSLSKKKDGKKEKNQVKASKLVGVFPEGPSKLKALKAAIEIDGNYGVALDPKPVVIRHIKVFKRIMALKEQNGGKPVRILKKGMLIHLTSSKDPKHAGVWRIESIQDSKGGVKLDLQRAHCAVPKNKTHECNWREVDLISLLKKYQMKRYPTSYTGTPR

SEQ ID NO: 339 - protein, 1424 aa, Prevotella sp.
MTQKVLGLDLGTNSIGSAVRNLDLSDDLQWQLEFFSSDIFRSSVNKESNGREYSLAAQRSAHRRSRGLNEVRRRRLWATLNLLIKHGFCPMSSESLMRWCTYDKRKGLFREYPIDDKDFNAWILLDFNGDGRPDYSSPYQLRRELVTRQFDFEQPIERYKLGRALYHIAQHRGFKSSKGETLSQQETNSKPSSTDEIPDVAGAMKASEEKLSKGLSTYMKEHNLLTVGAAFAQLEDEGVRVRNNNDYRAIRSQFQHEIETIFKFQQGLSVESELYERLISEKKNVGTIFYKRPLRSQRGNVGKCTLERSKPRCAIGHPLFEKFRAWTLINNIKVRMSVDTLDEQLPMKLRLDLYNECFLAFVRTEFKFEDIRKYLEKRLGIHFSYNDKTINYKDSTSVAGCPITARFRKMLGEEWESFRVEGQKERQAHSKNNISFHRVSYSIEDIWHFCYDAEEPEAVLAFAQETLRLERKKAEELVRIWSAMPQGYAMLSQKAIRNINKILMLGLKYSDAVILAKVPELVDVSDEELLSIAKDYYLVEAQVNYDKRINSIVNGLIAKYKSVSEEYRFADHNYEYLLDESDEKDIIRQIENSLGARRWSLMDANEQTDILQKVRDRYQDFFRSHERKFVESPKLGESFENYLTKKFPMVEREQWKKLYHPSQITIYRPVSVGKDRSVLRLGNPDIGAIKNPTVLRVLNTLRRRVNQLLDDGVISPDETRVVVETARELNDANRKWALDTYNRIRHDENEKIKKILEEFYPKRDGISTDDIDKARYVIDQREVDYFTGSKTYNKDIKKYKFWLEQGGQCMYTGRTINLSNLFDPNAFDIEHTIPESLSFDSSDMNLTLCDAHYNRFIKKNHIPTDMPNYDKAITIDGKEYPAITSQLQRWVERVERLNRNVEYWKGQARRAQNKDRKDQCMREMHLWKMELEYWKKKLERFTVTEVTDGFKNSQLVDTRVITRHAVLYLKSIFPHVDVQRGDVTAKFRKILGIQSVDEKKDRSLHSHHAIDATTLTIIPVSAKRDRMLELFAKIEEINKMLSFSGSEDRTGLIQELEGLKNKLQMEVKVCRIGHNVSEIGTFINDNIIVNHHIKNQALTPVRRRLRKKGYIVGGVDNPRWQTGDALRGEIHKASYYGAITQFAKDDEGKVLMKEGRPQVNPTIKFVIRRELKYKKSAADSGFASWDDLGKAIVDKELFALMKGQFPAETSFKDACEQGIYMIKKGKNGMPDIKLHHIRHVRCEAPQSGLKIKEQTYKSEKEYKRYFYAAVGDLYAMCCYTNGKIREFRIYSLYDVSCHRKSDIEDIPEFITDKKGNRLMLDYKLRTGDMILLYKDNPAELYDLDNVNLSRRLYKINRFESQSNLVLMTHHLSTSKERGRSLGKTVDYQNLPESIRSSVKSLNFLIMGENRDFVIKNGKIIFNHR

SEQ ID NO: 340 - protein, 1409 aa, Wolinella succinogenes
MLVSPISVDLGGKNTGFFSFTDSLDNSQSGTVIYDESFVLSQVGRRSKRHSKRNNLRNKLVKRLFLLILQEHHGLSIDVLPDEIRGLFNKRGYTYAGFELDEKKKDALESDTLKEFLSEKLQSIDRDSDVEDFLNQIASNAESFKDYKKGFEAVFASATHSPNKKLELKDELKSEYGENAKELLAGLRVTKEILDEFDKQENQGNLPRAKYFEELGEYIATNEKVKSFFDSNSLKLTDMTKLIGNISNYQLKELRRYFNDKEMEKGDIWIPNKLHKITERFVRSWHPKNDADRQRRAELMKDLKSKEIMELLTTTEPVMTIPPYDDMNNRGAVKCQTLRLNEEYLDKHLPNWRDIAKRLNHGKFNDDLADSTVKGYSEDSTLLHRLLDTSKEIDIYELRGKKPNELLVKTLGQSDANRLYGFAQNYYELIRQKVRAGIWVPVKNKDDSLNLEDNSNMLKRCNHNPPHKKNQIHNLVAGILGVKLDEAKFAEFEKELWSAKVGNKKLSAYCKNIEELRKTHGNTFKIDIEELRKKDPAELSKEEKAKLRLTDDVILNEWSQKIANFFDIDDKHRQRFNNLFSMAQLHTVIDTPRSGFSSTCKRCTAENRFRSETAFYNDETGEFHKKATATCQRLPADTQRPFSGKIERYIDKLGYELAKIKAKELEGMEAKEIKVPIILEQNAFEYEESLRKSKTGSNDRVINSKKDRDGKKLAKAKENAEDRLKDKDKRIKAFSSGICPYCGDTIGDDGEIDHILPRSHTLKIYGTVFNPEGNLIYVHQKCNQAKADSIYKLSDIKAGVSAQWIEEQVANIKGYKTFSVLSAEQQKAFRYALFLQNDNEAYKKVVDWLRTDQSARVNGTQKYLAKKIQEKLTKMLPNKHLSFEFILADATEVSELRRQYARQNPLLAKAEKQAPSSHAIDAVMAFVARYQKVFKDGTPPNADEVAKLAMLDSWNPASNEPLTKGLSTNQKIEKMIKSGDYGQKNMREVFGKSIFGENAIGERYKPIVVQEGGYYIGYPATVKKGYELKNCKVVTSKNDIAKLEKIIKNQDLISLKENQYIKIFSINKQTISELSNRYFNMNYKNLVERDKEIVGLLEFIVENCRYYTKKVDVKFAPKYIHETKYPFYDDWRRFDEAWRYLQENQNKTSSKDRFVIDKSSLNEYYQPDKNEYKLDVDTQPIWDDFCRWYFLDRYKTANDKKSIRIKARKTFSLLAESGVQGKVFRAKRKIPTGYAYQALPMDNNVIAGDYANILLEANSKTLSLVPKSGISIEKQLDKKLDVIKKTDVRGLAIDNNSFFNADFDTHGIRLIVENTSVKVGNFPISAIDKSAKRMIFRALFEKEKGKRKKKTTISFKESGPVQDYLKVFLKKIVKIQLRTDGSISNIVVRKNAADFTLSFRSEHIQKLLK

SEQ ID NO: 341 - protein, 1146 aa, Alicyclobacillus hesperidum
MAYRLGLDIGITSVGWAVVALEKDESGLKPVRIQDLGVRIFDKAEDSKTGASLALPRREARSARRRTRRRRHRLWRVKRLLEQHGILSMEQIEALYAQRTSSPDVYALRVAGLDRCLIAEEIARVLIHIAHRRGFQSNRKSEIKDSDAGKLLKAVQENENLMQSKGYRTVAEMLVSEATKTDAEGKLVHGKKHGYVSNVRNKAGEYRHTVSRQAIVDEVRKIFAAQRALGNDVMSEELEDSYLKILCSQRNFDDGPGGDSPYGHGSVSPDGVRQSIYERMVGSCTFETGEKRAPRSSYSFERFQLLTKVVNLRIYRQQEDGGRYPCELTQTERARVIDCAYEQTKITYGKLRKLLDMKDTESFAGLTYGLNRSRNKTEDTVFVEMKFYHEVRKALQRAGVFIQDLSIETLDQIGWILSVWKSDDNRRKKLSTLGLSDNVIEELLPLNGSKFGHLSLKAIRKILPFLEDGYSYDVACELAGYQFQGKTEYVKQRLLPPLGEGEVTNPVVRRALSQAIKVVNAVIRKHGSPESIHIELARELSKNLDERRKIEKAQKENQKNNEQIKDEIREILGSAHVTGRDIVKYKLFKQQQEFCMYSGEKLDVTRLFEPGYAEVDHIIPYGISFDDSYDNKVLVKTEQNRQKGNRTPLEYLRDKPEQKAKFIALVESIPLSQKKKNHLLMDKRAIDLEQEGFRERNLSDTRYITRALMNHIQAWLLFDETASTRSKRVVCVNGAVTAYMRARWGLTKDRDAGDKHHAADAVVVACIGDSLIQRVTKYDKFKRNALADRNRYVQQVSKSEGITQYVDKETGEVFTWESFDERKFLPNEPLEPWPFFRDELLARLSDDPSKNIRAIGLLTYSETEQIDPIFVSRMPTRKVTGAAHKETIRSPRIVKVDDNKGTEIQVVVSKVALTELKLTKDGEIKDYFRPEDDPRLYNTLRERLVQFGGDAKAAFKEPVYKISKDGSVRTPVRKVKIQEKLTLGVPVHGGRGIAENGGMVRIDVFAKGGKYYFVPIYVADVLKRELPNRLATAHKPYSEWRVVDDSYQFKFSLYPNDAVMIKPSREVDITYKDRKEPVGCRIMYFVSANIASASISLRTHDNSGELEGLGIQGLEVFEKYVVGPLGDTHPVYKERRMPFRVERKMN

SEQ ID NO: 342 - protein, 1442 aa, Caenispirillum salinarum
MPVLSPLSPNAAQGRRRWSLALDIGEGSIGWAVAEVDAEGRVLQLTGTGVTLFPSAWSNENGTYVAHGAADRAVRGQQQRHDSRRRRLAGLARLCAPVLERSPEDLKDLTRTPPKADPRAIFFLRADAARRPLDGPELFRVLHHMAAHRGIRLAELQEVDPPPESDADDAAPAATEDEDGTRRAAADERAFRRLMAEHMHRHGTQPTCGEIMAGRLRETPAGAQPVTRARDGLRVGGGVAVPTRALIEQEFDAIRAIQAPRHPDLPWDSLRRLVLDQAPIAVPPATPCLFLEELRRRGETFQGRTITREAIDRGLTVDPLIQALRIRETVGNLRLHERITEPDGRQRYVPRAMPELGLSHGELTAPERDTLVRALMHDPDGLAAKDGRIPYTRLRKLIGYDNSPVCFAQERDTSGGGITVNPTDPLMARWIDGWVDLPLKARSLYVRDVVARGADSAALARLLAEGAHGVPPVAAAAVPAATAAILESDIMQPGRYSVCPWAAEAILDAWANAPTEGFYDVTRGLFGFAPGEIVLEDLRRARGALLAHLPRTMAAARTPNRAAQQRGPLPAYESVIPSQLITSLRRAHKGRAADWSAADPEERNPFLRTWTGNAATDHILNQVRKTANEVITKYGNRRGWDPLPSRITVELAREAKHGVIRRNEIAKENRENEGRRKKESAALDTFCQDNTVSWQAGGLPKERAALRLRLAQRQEFFCPYCAERPKLRATDLFSPAETEIDHVIERRMGGDGPDNLVLAHKDCNNAKGKKTPHEHAGDLLDSPALAALWQGWRKENADRLKGKGHKARTPREDKDFMDRVGWRFEEDARAKAEENQERRGRRMLHDTARATRLARLYLAAAVMPEDPAEIGAPPVETPPSPEDPTGYTAIYRTISRVQPVNGSVTHMLRQRLLQRDKNRDYQTHHAEDACLLLLAGPAVVQAFNTEAAQHGADAPDDRPVDLMPTSDAYHQQRRARALGRVPLATVDAALADIVMPESDRQDPETGRVHWRLTRAGRGLKRRIDDLTRNCVILSRPRRPSETGTPGALHNATHYGRREITVDGRTDTVVTQRMNARDLVALLDNAKIVPAARLDAAAPGDTILKEICTEIADRHDRVVDPEGTHARRWISARLAALVPAHAEAVARDIAELADLDALADADRTPEQEARRSALRQSPYLGRAISAKKADGRARAREQEILTRALLDPHWGPRGLRHLIMREARAPSLVRIRANKTDAFGRPVPDAAVWVKTDGNAVSQLWRLTSVVTDDGRRIPLPKPIEKRIEISNLEYARLNGLDEGAGVTGNNAPPRPLRQDIDRLTPLWRDHGTAPGGYLGTAVGELEDKARSALRGKAMRQTLTDAGITAEAGWRLDSEGAVCDLEVAKGDTVKKDGKTYKVGVITQGIFGMPVDAAGSAPRTPEDCEKFEEQYGIKPWKAKGIPLA

SEQ ID NO: 343 - protein, 1114 aa, Eubacterium rectale
MNYTEKEKLFMKYILALDIGIASVGWAILDKESETVIEAGSNIFPEASAADNQLRRDMRGAKRNNRRLKTRINDFIKLWENNNLSIPQFKSTEIVGLKVRAITEEITLDELYLILYSYLKHRGISYLEDALDDTVSGSSAYANGLKLNAKELETHYPCEIQQERLNTIGKYRGQSQIINENGEVLDLSNVFTIGAYRKEIQRVFEIQKKYHPELTDEFCDGYMLIFNRKRKYYEGPGNEKSRTDYGRFTTKLDANGNYITEDNIFEKLIGKCSVYPDELRAAAASYTAQEYNVLNDLNNLTINGRKLEENEKHEIVERIKSSNTINMRKIISDCMGENIDDFAGARIDKSGKEIFHKFEVYNKMRKALLEIGIDISNYSREELDEIGYIMTINTDKEAMMEAFQKSWIDLSDDVKQCLINMRKTNGALFNKWQSFSLKIMNELIPEMYAQPKEQMTLLTEMGVTKGTQEEFAGLKYIPVDVVSEDIFNPVVRRSVRISFKILNAVLKKYKALDTIVIEMPRDRNSEEQKKRINDSQKLNEKEMEYIEKKLAVTYGIKLSPSDFSSQKQLSLKLKLWNEQDGICLYSGKTIDPNDIINNPQLFEIDHIIPRSISFDDARSNKVLVYRSENQKKGNQTPYYYLTHSHSEWSFEQYKATVMNLSKKKEYAISRKKIQNLLYSEDITKMDVLKGFINRNINDTSYASRLVLNTIQNFFMANEADTKVKVIKGSYTHQMRCNLKLDKNRDESYSHHAVDAMLIGYSELGYEAYHKLQGEFIDFETGEILRKDMWDENMSDEVYADYLYGKKWANIRNEVVKAEKNVKYWHYVMRKSNRGLCNQTIRGTREYDGKQYKINKLDIRTKEGIKVFAKLAFSKKDSDRERLLVYLNDRRTFDDLCKIYEDYSDAANPFVQYEKETGDIIRKYSKKHNGPRIDKLKYKDGEVGACIDISHKYGFEKGSKKVILESLVPYRMDVYYKEENHSYYLVGVKQSDIKFEKGRNVIDEEAYARILVNEKMIQPGQSRADLENLGFKFKLSFYKNDIIEYEKDGKIYTERLVSRTMPKQRNYIETKPIDKAKFEKQNLVGLGKTKFIKKYRYDILGNKYSCSEEKFTSFC

SEQ ID NO: 344 - protein, 1314 aa, Mycoplasma synoviae
MLRLYCANNLVLNNVQNLWKYLLLLIFDKKIIFLFKIKVILIRRYMENNNKEKIVIGFDLGVASVGWSIVNAETKEVIDLGVRLFSEPEKADYRRAKRTTRRLLRRKKFKREKFHKLILKNAEIFGLQSRNEILNVYKDQSSKYRNILKLKINALKEEIKPSELVWILRDYLQNRGYFYKNEKLTDEFVSNSFPSKKLHEHYEKYGFFRGSVKLDNKLDNKKDKAKEKDEEEESDAKKESEELIFSNKQWINEIVKVFENQSYLTESFKEEYLKLFNYVRPFNKGPGSKNSRTAYGVFSTDIDPETNKFKDYSNIWDKTIGKCSLFEEEIRAPKNLPSALIFNLQNEICTIKNEFTEFKNWWLNAEQKSEILKFVFTELFNWKDKKYSDKKFNKNLQDKIKKYLLNFALENFNLNEEILKNRDLENDTVLGLKGVKYYEKSNATADAALEFSSLKPLYVFIKFLKEKKLDLNYLLGLENTEILYFLDSIYLAISYSSDLKERNEWFKKLLKELYPKIKNNNLEIIENVEDIFEITDQEKFESFSKTHSLSREAFNHIIPLLLSNNEGKNYESLKHSNEELKKRTEKAELKAQQNQKYLKDNFLKEALVPLSVKTSVLQAIKIFNQIIKNFGKKYEISQVVIEMARELTKPNLEKLLNNATNSNIKILKEKLDQTEKFDDFTKKKFIDKIENSVVFRNKLFLWFEQDRKDPYTQLDIKINEIEDETEIDHVIPYSKSADDSWFNKLLVKKSTNQLKKNKTVWEYYQNESDPEAKWNKFVAWAKRIYLVQKSDKESKDNSEKNSIFKNKKPNLKFKNITKKLFDPYKDLGFLARNLNDTRYATKVFRDQLNNYSKHHSKDDENKLFKVVCMNGSITSFLRKSMWRKNEEQVYRFNFWKKDRDQFFHHAVDASIIAIFSLLTKTLYNKLRVYESYDVQRREDGVYLINKETGEVKKADKDYWKDQHNFLKIRENAIEIKNVLNNVDFQNQVRYSRKANTKLNTQLFNETLYGVKEFENNFYKLEKVNLFSRKDLRKFILEDLNEESEKNKKNENGSRKRILTEKYIVDEILQILENEEFKDSKSDINALNKYMDSLPSKFSEFFSQDFINKCKKENSLILTFDAIKHNDPKKVIKIKNLKFFREDATLKNKQAVHKDSKNQIKSFYESYKCVGFIWLKNKNDLEESIFVPINSRVIHFGDKDKDIFDFDSYNKEKLLNEINLKRPENKKFNSINEIEFVKFVKPGALLLNFENQQIYYISTLESSSLRAKIKLLNKMDKGKAVSMKKITNPDEYKIIEHVNPLGINLNWTKKLENNN

SEQ ID NO: 345 - protein, 1197 aa, Porphyromonas sp.
MLMSKHVLGLDLGVGSIGWCLIALDAQGDPAEILGMGSRVVPLNNATKAIEAFNAGAAFTASQERTARRTMRRGFARYQLRRYRLRRELEKVGMLPDAALIQLPLLELWELRERAATAGRRLTLPELGRVLCHINQKRGYRHVKSDAAAIVGDEGEKKKDSNSAYLAGIRANDEKLQAEHKTVGQYFAEQLRQNQSESPTGGISYRIKDQIFSRQCYIDEYDQIMAVQRVHYPDILTDEFIRMLRDEVIFMQRPLKSCKHLVSLCEFEKQERVMRVQQDDGKGGWQLVERRVKFGPKVAPKSSPLFQLCCIYEAVNNIRLTRPNGSPCDITPEERAKIVAHLQSSASLSFAALKKLLKEKALIADQLTSKSGLKGNSTRVALASALQPYPQYHHLLDMELETRMMTVQLTDEETGEVTEREVAVVTDSYVRKPLYRLWHILYSIEEREAMRRALITQLGMKEEDLDGGLLDQLYRLDFVKPGYGNKSAKFICKLLPQLQQGLGYSEACAAVGYRHSNSPTSEEITERTLLEKIPLLQRNELRQPLVEKILNQMINLVNALKAEYGIDEVRVELARELKMSREERERMARNNKDREERNKGVAAKIRECGLYPTKPRIQKYMLWKEAGRQCLYCGRSIEEEQCLREGGMEVEHIIPKSVLYDDSYGNKTCACRRCNKEKGNRTALEYIRAKGREAEYMKRINDLLKEKKISYSKHQRLRWLKEDIPSDFLERQLRLTQYISRQAMAILQQGIRRVSASEGGVTARLRSLWGYGKILHTLNLDRYDSMGETERVSREGEATEELHITNWSKRMDHRHHAIDALVVACTRQSYIQRLNRLSSEFGREDKKKEDQEAQEQQATETGRLSNLERWLTQRPHFSVRTVSDKVAEILISYRPGQRVVTRGRNIYRKKMADGREVSCVQRGVLVPRGELMEASFYGKILSQGRVRIVKRYPLHDLKGEVVDPHLRELITTYNQELKSREKGAPIPPLCLDKDKKQEVRSVRCYAKTLSLDKAIPMCFDEKGEPTAFVKSASNHHLALYRTPKGKLVESIVTFWDAVDRARYGIPLVITHPREVMEQVLQRGDIPEQVLSLLPPSDWVFVDSLQQDEMVVIGLSDEELQRALEAQNYRKISEHLYRVQKMSSSYYVFRYHLETSVADDKNTSGRIPKFHRVQSLKAYEERNIRKVRVDLLGRISLL

SEQ ID NO: 346 - protein, 1121 aa, Streptococcus thermophilus
MSDLVLGLDIGIGSVGVGILNKVTGEIIHKNSRIFPAAQAENNLVRRTNRQGRRLARRKKHRRVRLNRLFEESGLITDFTKISINLNPYQLRVKGLTDELSNEELFIALKNMVKHRGISYLDDASDDGNSSVGDYAQIVKENSKQLETKTPGQIQLERYQTYGQLRGDFTVEKDGKKHRLINVFPTSAYRSEALRILQTQQEFNPQITDEFINRYLEILTGKRKYYHGPGNEKSRTDYGRYRTSGETLDNIFGILIGKCTFYPDEFRAAKASYTAQEFNLLNDLNNLTVPTETKKLSKEQKNQIINYVKNEKAMGPAKLFKYIAKLLSCDVADIKGYRIDKSGKAEIHTFEAYRKMKTLETLDIEQMDRETLDKLAYVLTLNTEREGIQEALEHEFADGSFSQKQVDELVQFRKANSSIFGKGWHNFSVKLMMELIPELYETSEEQMTILTRLGKQKTTSSSNKTKYIDEKLLTEEIYNPVVAKSVRQAIKIVNAAIKEYGDFDNIVIEMARETNEDDEKKAIQKIQKANKDEKDAAMLKAANQYNGKAELPHSVFHGHKQLATKIRLWHQQGERCLYTGKTISIHDLINNSNQFEVDHILPLSITFDDSLANKVLVYATANQEKGQRTPYQALDSMDDAWSFRELKAFVRESKTLSNKKKEYLLTEEDISKFDVRKKFIERNLVDTRYASRVVLNALQEHFRAHKIDTKVSVVRGQFTSQLRRHWGIEKTRDTYHHHAVDALIIAASSQLNLWKKQKNTLVSYSEDQLLDIETGELISDDEYKESVFKAPYQHFVDTLKSKEFEDSILFSYQVDSKFNRKISDATIYATRQAKVGKDKADETYVLGKIKDIYTQDGYDAFMKIYKKDKSKFLMYRHDPQTFEKVIEPILENYPNKQINEKGKEVPCNPFLKYKEEHGYIRKYSKKGNGPEIKSLKYYDSKLGNHIDITPKDSNNKVVLQSVSPWRADVYFNKTTGKYEILGLKYADLQFEKGTGTYKISQEKYNDIKKKEGVDSDSEFKFTLYKNDLLLVKDTETKEQQLFRFLSRTMPKQKHYVELKPYDKQKFEGGEALIKVLGNVANSGQCKKGLGKSNISIYKVRTDVLGNQHIIKNEGDKPKLDF

SEQ ID NO: 347 - protein, 1152 aa, Roseburia inulinivorans
MNAEHGKEGLLIMEENFQYRIGLDIGITSVGWAVLQNNSQDEPVRITDLGVRIFDVAENPKNGDALAAPRRDARTTRRRLRRRRHRLERIKFLLQENGLIEMDSFMERYYKGNLPDVYQLRYEGLDRKLKDEELAQVLIHIAKHRGFRSTRKAETKEKEGGAVLKATTENQKIMQEKGYRTVGEMLYLDEAFHTECLWNEKGYVLTPRNRPDDYKHTILRSMLVEEVHAIFAAQRAHGNQKATEGLEEAYVEIMTSQRSFDMGPGLQPDGKPSPYAMEGFGDRVGKCTFEKDEYRAPKATYTAELFVALQKINHTKLIDEFGTGRFFSEEERKTIIGLLLSSKELKYGTIRKKLNIDPSLKFNSLNYSAKKEGETEEERVLDTEKAKFASMFWTYEYSKCLKDRTEEMPVGEKADLFDRIGEILTAYKNDDSRSSRLKELGLSGEEIDGLLDLSPAKYQRVSLKAMRKMQPYLEDGLIYDKACEAAGYDFRALNDGNKKHLLKGEEINAIVNDITNPVVKRSVSQTIKVINAIIQKYGSPQAVNIELAREMSKNFQDRTNLEKEMKKRQQENERAKQQIIELGKQNPTGQDILKYRLWNDQGGYCLYSGKKIPLEELFDGGYDIDHILPYSITFDDSYRNKVLVTAQENRQKGNRTPYEYFGADEKRWEDYEASVRLLVRDYKKQQKLLKKNFTEEERKEFKERNLNDTKYITRVVYNMIRQNLELEPFNHPEKKKQVWAVNGAVTSYLRKRWGLMQKDRSTDRHHAMDAVVIACCTDGMIHKISRYMQGRELAYSRNFKFPDEETGEILNRDNFTREQWDEKFGVKVPLPWNSFRDELDIRLLNEDPKNFLLTHADVQRELDYPGWMYGEEESPIEEGRYINYIRPLFVSRMPNHKVTGSAHDATIRSARDYETRGVVITKVPLTDLKLNKDNEIEGYYDKDSDRLLYQALVRQLLLHGNDGKKAFAEDFHKPKADGTEGPVVRKVKIEKKQTSGVMVRGGTGIAANGEMVRIDVFRENGKYYFVPVYTADVVRKVLPNRAATHTKPYSEWRVMDDANFVFSLYSRDLIHVKSKKDIKTNLVNGGLLLQKEIFAYYTGADIATASIAGFANDSNFKFRGLGIQSLEIFEKCQVDILGNISVVRHENRQEFH

SEQ ID NO: 348 - protein, 1082 aa, Methylosinus trichosporium
MRVLGLDAGIASLGWALIEIEESNRGELSQGTIIGAGTWMFDAPEEKTQAGAKLKSEQRRTFRGQRRVVRRRRQRMNEVRRILHSHGLLPSSDRDALKQPGLDPWRIRAEALDRLLGPVELAVALGHIARHRGFKSNSKGAKTNDPADDTSKMKRAVNETREKLARFGSAAKMLVEDESFVLRQTPTKNGASEIVRRFRNREGDYSRSLLRDDLAAEMRALFTAQARFQSAIATADLQTAFTKAAFFQRPLQDSEKLVGPCPFEVDEKRAPKRGYSFELFRFLSRLNHVTLRDGKQERTLTRDELALAAADFGAAAKVSFTALRKKLKLPETTVFVGVKADEESKLDVVARSGKAAEGTARLRSVIVDALGELAWGALLCSPEKLDKIAEVISFRSDIGRISEGLAQAGCNAPLVDALTAAASDGRFDPFTGAGHISSKAARNILSGLRQGMTYDKACCAADYDHTASRERGAFDVGGHGREALKRILQEERISRELVGSPTARKALIESIKQVKAIVERYGVPDRIHVELARDVGKSIEEREEITRGIEKRNRQKDKLRGLFEKEVGRPPQDGARGKEELLRFELWSEQMGRCLYTDDYISPSQLVATDDAVQVDHILPWSRFADDSYANKTLCMAKANQDKKGRTPYEWFKAEKTDTEWDAFIVRVEALADMKGFKKRNYKLRNAEEAAAKFRNRNLNDTRWACRLLAEALKQLYPKGEKDKDGKERRRVFSRPGALTDRLRRAWGLQWMKKSTKGDRIPDDRHHALDAIVIAATTESLLQRATREVQEIEDKGLHYDLVKNVTPPWPGFREQAVEAVEKVFVARAERRRARGKAHDATIRHIAVREGEQRVYERRKVAELKLADLDRVKDAERNARLIEKLRNWIEAGSPKDDPPLSPKGDPIFKVRLVTKSKVNIALDTGNPKRPGTVDRGEMARVDVFRKASKKGKYEYYLVPIYPHDIATMKTPPIRAVQAYKPEDEWPEMDSSYEFCWSLVPMTYLQVISSKGEIFEGYYRGMNRSVGAIQLSAHSNSSDVVQGIGARTLTEFKKFNVDRFGRKHEVERELRTWRGETWRGKAYI

SEQ ID NO: 349 - protein, 1156 aa, Ruminococcus albus
MGNYYLGLDVGIGSIGWAVINIEKKRIEDFNVRIFKSGEIQEKNRNSRASQQCRRSRGLRRLYRRKSHRKLRLKNYLSIIGLTTSEKIDYYYETADNNVIQLRNKGLSEKLTPEEIAACLIHICNNRGYKDFYEVNVEDIEDPDERNEYKEEHDSIVLISNLMNEGGYCTPAEMICNCREFDEPNSVYRKFHNSAASKNHYLITRHMLVKEVDLILENQSKYYGILDDKTIAKIKDIIFAQRDFEIGPGKNERFRRFTGYLDSIGKCQFFKDQERGSRFTVIADIYAFVNVLSQYTYTNNRGESVFDTSFANDLINSALKNGSMDKRELKAIAKSYHIDISDKNSDTSLTKCFKYIKVVKPLFEKYGYDWDKLIENYTDTDNNVLNRIGIVLSQAQTPKRRREKLKALNIGLDDGLINELTKLKLSGTANVSYKYMQGSIEAFCEGDLYGKYQAKFNKEIPDIDENAKPQKLPPFKNEDDCEFFKNPVVFRSINETRKLINAIIDKYGYPAAVNIETADELNKTFEDRAIDTKRNNDNQKENDRIVKEIIECIKCDEVHARHLIEKYKLWEAQEGKCLYSGETITKEDMLRDKDKLFEVDHIVPYSLILDNTINNKALVYAEENQKKGQRTPLMYMNEAQAADYRVRVNTMFKSKKCSKKKYQYLMLPDLNDQELLGGWRSRNLNDTRYICKYLVNYLRKNLRFDRSYESSDEDDLKIRDHYRVFPVKSRFTSMFRRWWLNEKTWGRYDKAELKKLTYLDHAADAIIIANCRPEYVVLAGEKLKLNKMYHQAGKRITPEYEQSKKACIDNLYKLFRMDRRTAEKLLSGHGRLTPIIPNLSEEVDKRLWDKNIYEQFWKDDKDKKSCEELYRENVASLYKGDPKFASSLSMPVISLKPDHKYRGTITGEEAIRVKEIDGKLIKLKRKSISEITAESINSIYTDDKILIDSLKTIFEQADYKDVGDYLKKTNQHFFTTSSGKRVNKVTVIEKVPSRWLRKEIDDNNFSLLNDSSYYCIELYKDSKGDNNLQGIAMSDIVHDRKTKKLYLKPDFNYPDDYYTHVMYIFPGDYLRIKSTSKKSGEQLKFEGYFISVKNVNENSFRFISDNKPCAKDKRVSITKKDIVIKLAVDLMGKVQGENNGKGISCGEPLSLLKEKN

SEQ ID NO: 350 - protein, 1187 aa, Bifidobacterium longum
MLSRQLLGASHLARPVSYSYNVQDNDVHCSYGERCFMRGKRYRIGIDVGLNSVGLAAVEVSDENSPVRLLNAQSVIHDGGVDPQKNKEAITRKNMSGVARRTRRMRRRKRERLHKLDMLLGKFGYPVIEPESLDKPFEEWHVRAELATRYIEDDELRRESISIALRHMARHRGWRNPYRQVDSLISDNPYSKQYGELKEKAKAYNDDATAAEEESTPAQLVVAMLDAGYAEAPRLRWRTGSKKPDAEGYLPVRLMQEDNANELKQIFRVQRVPADEWKPLFRSVFYAVSPKGSAEQRVGQDPLAPEQARALKASLAFQEYRIANVITNLRIKDASAELRKLTVDEKQSIYDQLVSPSSEDITWSDLCDFLGFKRSQLKGVGSLTEDGEERISSRPPRLTSVQRIYESDNKIRKPLVAWWKSASDNEHEAMIRLLSNTVDIDKVREDVAYASAIEFIDGLDDDALTKLDSVDLPSGRAAYSVETLQKLTRQMLTTDDDLHEARKTLFNVTDSWRPPADPIGEPLGNPSVDRVLKNVNRYLMNCQQRWGNPVSVNIEHVRSSFSSVAFARKDKREYEKNNEKRSIFRSSLSEQLRADEQMEKVRESDLRRLEAIQRQNGQCLYCGRTITFRTCEMDHIVPRKGVGSTNTRTNFAAVCAECNRMKSNTPFAIWARSEDAQTRGVSLAEAKKRVTMFTFNPKSYAPREVKAFKQAVIARLQQTEDDAAIDNRSIESVAWMADELHRRIDWYFNAKQYVNSASIDDAEAETMKTTVSVFQGRVTASARRAAGIEGKIHFIGQQSKTRLDRRHHAVDASVIAMMNTAAAQTLMERESLRESQRLIGLMPGERSWKEYPYEGTSRYESFHLWLDNMDVLLELLNDALDNDRIAVMQSQRYVLGNSIAHDATIHPLEKVPLGSAMSADLIRRASTPALWCALTRLPDYDEKEGLPEDSHREIRVHDTRYSADDEMGFFASQAAQIAVQEGSADIGSAIHHARVYRCWKTNAKGVRKYFYGMIRVFQTDLLRACHDDLFTVPLPPQSISMRYGEPRVVQALQSGNAQYLGSLVVGDEIEMDFSSLDVDGQIGEYLQFFSQFSGGNLAWKHWVVDGFFNQTQLRIRPRYLAAEGLAKAFSDDVVPDGVQKIVTKQGWLPPVNTASKTAVRIVRRNAFGEPRLSSAHHMPCSWQWRHE

SEQ ID NO: 351 - protein, 1150 aa, Enterococcus faecalis
MYSIGLDLGISSVGWSVIDERTGNVIDLGVRLFSAKNSEKNLERRTNRGGRRLIRRKTNRLKDAKKILAAVGFYEDKSLKNSCPYQLRVKGLTEPLSRGEIYKVTLHILKKRGISYLDEVDTEAAKESQDYKEQVRKNAQLLTKYTPGQIQLQRLKENNRVKTGINAQGNYQLNVFKVSAYANELATILKTQQAFYPNELTDDWIALFVQPGIAEEAGLIYRKRPYYHGPGNEANNSPYGRWSDFQKTGEPATNIFDKLIGKDFQGELRASGLSLSAQQYNLLNDLTNLKIDGEVPLSSEQKEYILTELMTKEFTRFGVNDVVKLLGVKKERLSGWRLDKKGKPEIHTLKGYRNWRKIFAEAGIDLATLPTETIDCLAKVLTLNTEREGIENTLAFELPELSESVKLLVLDRYKELSQSISTQSWHRFSLKTLHLLIPELMNATSEQNTLLEQFQLKSDVRKRYSEYKKLPTKDVLAEIYNPTVNKTVSQAFKVIDALLVKYGKEQIRYITIEMPRDDNEEDEKKRIKELHAKNSQRKNDSQSYFMQKSGWSQEKFQTTIQKNRRFLAKLLYYYEQDGICAYTGLPISPELLVSDSTEIDHIIPISISLDDSINNKVLVLSKANQVKGQQTPYDAWMDGSFKKINGKFSNWDDYQKWVESRHFSHKKENNLLETRNIFDSEQVEKFLARNLNDTRYASRLVLNTLQSFFTNQETKVRVVNGSFTHTLRKKWGADLDKTRETHHHHAVDATLCAVTSFVKVSRYHYAVKEETGEKVMREIDFETGEIVNEMSYWEFKKSKKYERKTYQVKWPNFREQLKPVNLHPRIKFSHQVDRKANRKLSDATIYSVREKTEVKTLKSGKQKITTDEYTIGKIKDIYTLDGWEAFKKKQDKLLMKDLDEKTYERLLSIAETTPDFQEVEEKNGKVKRVKRSPFAVYCEENDIPAIQKYAKKNNGPLIRSLKYYDGKLNKHINITKDSQGRPVEKTKNGRKVTLQSLKPYRYDIYQDLETKAYYTVQLYYSDLRFVEGKYGITEKEYMKKVAEQTKGQVVRFCFSLQKNDGLEIEWKDSQRYDVRFYNFQSANSINFKGLEQEMMPAENQFKQKPYNNGAINLNIAKYGKEGKKLRKFNTDILGKKHYLFYEKEPKNIIK

SEQ ID NO: 352 - protein, 1236 aa, Mycoplasma mobile
MYFYKNKENKLNKKVVLGLDLGIASVGWCLTDISQKEDNKFPIILHGVRLFETVDDSDDKLLNETRRKKRGQRRRNRRLFTRKRDFIKYLIDNNIIELEFDKNPKILVRNFIEKYINPFSKNLELKYKSVTNLPIGFHNLRKAAINEKYKLDKSELIVLLYFYLSLRGAFFDNPEDTKSKEMNKNEIEIFDKNESIKNAEFPIDKIIEFYKISGKIRSTINLKFGHQDYLKEIKQVFEKQNIDFMNYEKFAMEEKSFFSRIRNYSEGPGNEKSFSKYGLYANENGNPELIINEKGQKIYTKIFKTLWESKIGKCSYDKKLYRAPKNSFSAKVFDITNKLTDWKHKNEYISERLKRKILLSRFLNKDSKSAVEKILKEENIKFENLSEIAYNKDDNKINLPIINAYHSLTTIFKKHLINFENYLISNENDLSKLMSFYKQQSEKLFVPNEKGSYEINQNNNVLHIFDAISNILNKFSTIQDRIRILEGYFEFSNLKKDVKSSEIYSEIAKLREFSGTSSLSFGAYYKFIPNLISEGSKNYSTISYEEKALQNQKNNFSHSNLFEKTWVEDLIASPTVKRSLRQTMNLLKEIFKYSEKNNLEIEKIVVEVTRSSNNKHERKKIEGINKYRKEKYEELKKVYDLPNENTTLLKKLWLLRQQQGYDAYSLRKIEANDVINKPWNYDIDHIVPRSISFDDSFSNLVIVNKLDNAKKSNDLSAKQFIEKIYGIEKLKEAKENWGNWYLRNANGKAFNDKGKFIKLYTIDNLDEFDNSDFINRNLSDTSYITNALVNHLTFSNSKYKYSVVSVNGKQTSNLRNQIAFVGIKNNKETEREWKRPEGFKSINSNDFLIREEGKNDVKDDVLIKDRSFNGHHAEDAYFITIISQYFRSFKRIERLNVNYRKETRELDDLEKNNIKFKEKASFDNFLLINALDELNEKLNQMRFSRMVITKKNTQLFNETLYSGKYDKGKNTIKKVEKLNLLDNRTDKIKKIEEFFDEDKLKENELTKLHIFNHDKNLYETLKIIWNEVKIEIKNKNLNEKNYFKYFVNKKLQEGKISFNEWVPILDNDFKIIRKIRYIKFSSEEKETDEIIFSQSNFLKIDQRQNFSFHNTLYWVQIWVYKNQKDQYCFISIDARNSKFEKDEIKINYEKLKTQKEKLQIINEEPILKINKGDLFENEEKELFYIVGRDEKPQKLEIKYILGKKIKDQKQIQKPVKKYFPNWKKVNLTYMGEIFKK

SEQ ID NO: 353 - protein, 1105 aa, Actinomyces coleocanis
MDNKNYRIGIDVGLNSIGFCAVEVDQHDTPLGFLNLSVYRHDAGIDPNGKKTNTTRLAMSGVARRTRRLFRKRKRRLAALDRFIEAQGWTLPDHADYKDPYTPWLVRAELAQTPIRDENDLHEKLAIAVRHIARHRGWRSPWVPVRSLHVEQPPSDQYLALKERVEAKTLLQMPEGATPAEMVVALDLSVDVNLRPKNREKTDTRPENKKPGFLGGKLMQSDNANELRKIAKIQGLDDALLRELIELVFAADSPKGASGELVGYDVLPGQHGKRRAEKAHPAFQRYRIASIVSNLRIRHLGSGADERLDVETQKRVFEYLLNAKPTADITWSDVAEEIGVERNLLMGTATQTADGERASAKPPVDVTNVAFATCKIKPLKEWWLNADYEARCVMVSALSHAEKLTEGTAAEVEVAEFLQNLSDEDNEKLDSFSLPIGRAAYSVDSLERLTKRMIENGEDLFEARVNEFGVSEDWRPPAEPIGARVGNPAVDRVLKAVNRYLMAAEAEWGAPLSVNIEHVREGFISKRQAVEIDRENQKRYQRNQAVRSQIADHINATSGVRGSDVTRYLAIQRQNGECLYCGTAITFVNSEMDHIVPRAGLGSTNTRDNLVATCERCNKSKSNKPFAVWAAECGIPGVSVAEALKRVDFWIADGFASSKEHRELQKGVKDRLKRKVSDPEIDNRSMESVAWMARELAHRVQYYFDEKHTGTKVRVFRGSLTSAARKASGFESRVNFIGGNGKTRLDRRHHAMDAATVAMLRNSVAKTLVLRGNIRASERAIGAAETWKSFRGENVADRQIFESWSENMRVLVEKFNLALYNDEVSIFSSLRLQLGNGKAHDDTITKLQMHKVGDAWSLTEIDRASTPALWCALTRQPDFTWKDGLPANEDRTIIVNGTHYGPLDKVGIFGKAAASLLVRGGSVDIGSAIHHARIYRIAGKKPTYGMVRVFAPDLLRYRNEDLFNVELPPQSVSMRYAEPKVREAIREGKAEYLGWLVVGDELLLDLSSETSGQIAELQQDFPGTTHWTVAGFFSPSRLRLRPVYLAQEGLGEDVSEGSKSIIAGQGWRPAVNKVFGSAMPEVIRRDGLGRKRRFSYSGLPVSWQG

SEQ ID NO: 354 - protein, 1079 aa, Dinoroseobacter shibae
MRLGLDIGTSSIGWWLYETDGAGSDARITGVVDGGVRIFSDGRDPKSGASLAVDRRAARAMRRRRDRYLRRRATLMKVLAETGLMPADPAEAKALEALDPFALRAAGLDEPLPLPHLGRALFHLNQRRGFKSNRKTDRGDNESGKIKDATARLDMEMMANGARTYGEFLHKRRQKATDPRHVPSVRTRLSIANRGGPDGKEEAGYDFYPDRRHLEEEFHKLWAAQGAHHPELTETLRDLLFEKIFFQRPLKEPEVGLCLFSGHHGVPPKDPRLPKAHPLTQRRVLYETVNQLRVTADGREARPLTREERDQVIHALDNKKPTKSLSSMVLKLPALAKVLKLRDGERFTLETGVRDAIACDPLRASPAHPDRFGPRWSILDADAQWEVISRIRRVQSDAEHAALVDWLTEAHGLDRAHAEATAHAPLPDGYGRLGLTATTRILYQLTADVVTYADAVKACGWHHSDGRTGECFDRLPYYGEVLERHVIPGSYHPDDDDITRFGRITNPTVHIGLNQLRRLVNRIIETHGKPHQIVVELARDLKKSEEQKRADIKRIRDTTEAAKKRSEKLEELEIEDNGRNRMLLRLWEDLNPDDAMRRFCPYTGTRISAAMIFDGSCDVDHILPYSRTLDDSFPNRTLCLREANRQKRNQTPWQAWGDTPHWHAIAANLKNLPENKRWRFAPDAMTRFEGENGFLDRALKDTQYLARISRSYLDTLFTKGGHVWVVPGRFTEMLRRHWGLNSLLSDAGRGAVKAKNRTDHRHHAIDAAVIAATDPGLLNRISRAAGQGEAAGQSAELIARDTPPPWEGFRDDLRVRLDRIIVSHRADHGRIDHAARKQGRDSTAGQLHQETAYSIVDDIHVASRTDLLSLKPAQLLDEPGRSGQVRDPQLRKALRVATGGKTGKDFENALRYFASKPGPYQAIRRVRIIKPLQAQARVPVPAQDPIKAYQGGSNHLFEIWRLPDGEIEAQVITSFEAHTLEGEKRPHPAAKRLLRVHKGDMVALERDGRRVVGHVQKMDIANGLFIVPHNEANADTRNNDKSDPFKWIQIGARPAIASGIRRVSVDEIGRLRDGGTRPI

SEQ ID NO: 355 - protein, 1181 aa, Actinomyces sp.
MLHCIAVIRVPPSEEPGFFETHADSCALCHHGCMTYAANDKAIRYRVGIDVGLRSIGFCAVEVDDEDHPIRILNSVVHVHDAGTGGPGETESLRKRSGVAARARRRGRAEKQRLKKLDVLLEELGWGVSSNELLDSHAPWHIRKRLVSEYIEDETERRQCLSVAMAHIARHRGWRNSFSKVDTLLLEQAPSDRMQGLKERVEDRTGLQFSEEVTQGELVATLLEHDGDVTIRGFVRKGGKATKVHGVLEGKYMQSDLVAELRQICRTQRVSETTFEKLVLSIFHSKEPAPSAARQRERVGLDELQLALDPAAKQPRAERAHPAFQKFKVVATLANMRIREQSAGERSLTSEELNRVARYLLNHTESESPTWDDVARKLEVPRHRLRGSSRASLETGGGLTYPPVDDTTVRVMSAEVDWLADWWDCANDESRGHMIDAISNGCGSEPDDVEDEEVNELISSATAEDMLKLELLAKKLPSGRVAYSLKTLREVTAAILETGDDLSQAITRLYGVDPGWVPTPAPIEAPVGNPSVDRVLKQVARWLKFASKRWGVPQTVNIEHTREGLKSASLLEEERERWERFEARREIRQKEMYKRLGISGPFRRSDQVRYEILDLQDCACLYCGNEINFQTFEVDHIIPRVDASSDSRRTNLAAVCHSCNSAKGGLAFGQWVKRGDCPSGVSLENAIKRVRSWSKDRLGLTEKAMGKRKSEVISRLKTEMPYEEFDGRSMESVAWMAIELKKRIEGYFNSDRPEGCAAVQVNAYSGRLTACARRAAHVDKRVRLIRLKGDDGHHKNRFDRRNHAMDALVIALMTPAIARTIAVREDRREAQQLTRAFESWKNFLGSEERMQDRWESWIGDVEYACDRLNELIDADKIPVTENLRLRNSGKLHADQPESLKKARRGSKRPRPQRYVLGDALPADVINRVTDPGLWTALVRAPGFDSQLGLPADLNRGLKLRGKRISADFPIDYFPTDSPALAVQGGYVGLEFHHARLYRIIGPKEKVKYALLRVCAIDLCGIDCDDLFEVELKPSSISMRTADAKLKEAMGNGSAKQIGWLVLGDEIQIDPTKFPKQSIGKFLKECGPVSSWRVSALDTPSKITLKPRLLSNEPLLKTSRVGGHESDLVVAECVEKIMKKTGWVVEINALCQSGLIRVIRRNALGEVRTSPKSGLPISLNLR

SEQ ID NO: 356 - protein, 1113 aa, Alcanivorax sp.
MRYRVGLDLGTASVGAAVFSMDEQGNPMELIWHYERLFSEPLVPDMGQLKPKKAARRLARQQRRQIDRRASRLRRIAIVSRRLGIAPGRNDSGVHGNDVPTLRAMAVNERIELGQLRAVLLRMGKKRGYGGTFKAVRKVGEAGEVASGASRLEEEMVALASVQNKDSVTVGEYLAARVEHGLPSKLKVAANNEYYAPEYALFRQYLGLPAIKGRPDCLPNMYALRHQIEHEFERIWATQSQFHDVMKDHGVKEEIRNAIFFQRPLKSPADKVGRCSLQTNLPRAPRAQIAAQNFRIEKQMADLRWGMGRRAEMLNDHQKAVIRELLNQQKELSFRKIYKELERAGCPGPEGKGLNMDRAALGGRDDLSGNTTLAAWRKLGLEDRWQELDEVTQIQVINFLADLGSPEQLDTDDWSCRFMGKNGRPRNFSDEFVAFMNELRMTDGFDRLSKMGFEGGRSSYSIKALKALTEWMIAPHWRETPETHRVDEEAAIRECYPESLATPAQGGRQSKLEPPPLTGNEVVDVALRQVRHTINMMIDDLGSVPAQIVVEMAREMKGGVTRRNDIEKQNKRFASERKKAAQSIEENGKTPTPARILRYQLWIEQGHQCPYCESNISLEQALSGAYTNFEHILPRTLTQIGRKRSELVLAHRECNDEKGNRTPYQAFGHDDRRWRIVEQRANALPKKSSRKTRLLLLKDFEGEALTDESIDEFADRQLHESSWLAKVTTQWLSSLGSDVYVSRGSLTAELRRRWGLDTVIPQVRFESGMPVVDEEGAEITPEEFEKFRLQWEGHRVTREMRTDRRPDKRIDHRHHLVDAIVTALTSRSLYQQYAKAWKVADEKQRHGRVDVKVELPMPILTIRDIALEAVRSVRISHKPDRYPDGRFFEATAYGIAQRLDERSGEKVDWLVSRKSLTDLAPEKKSIDVDKVRANISRIVGEAIRLHISNIFEKRVSKGMTPQQALREPIEFQGNILRKVRCFYSKADDCVRIEHSSRRGHHYKMLLNDGFAYMEVPCKEGILYGVPNLVRPSEAVGIKRAPESGDFIRFYKGDTVKNIKTGRVYTIKQILGDGGGKLILTPVTETKPADLLSAKWGRLKVGGRNIHLLRLCAE

SEQ ID NO: 357 - protein, 1052 aa, Aminomonas paucivorans
MIGEHVRGGCLFDDHWTPNWGAFRLPNTVRTFTKAENPKDGSSLAEPRRQARGLRRRLRRKTQRLEDLRRLLAKEGVLSLSDLETLFRETPAKDPYQLRAEGLDRPLSFPEWVRVLYHITKHRGFQSNRRNPVEDGQERSRQEEEGKLLSGVGENERLLREGGYRTAGEMLARDPKFQDHRRNRAGDYSHTLSRSLLLEEARRLFQSQRTLGNPHASSNLEEAFLHLVAFQNPFASGEDIRNKAGHCSLEPDQIRAPRRSASAETFMLLQKTGNLRLIHRRTGEERPLTDKEREQIHLLAWKQEKVTHKTLRRHLEIPEEWLFTGLPYHRSGDKAEEKLFVHLAGIHEIRKALDKGPDPAVWDTLRSRRDLLDSIADTLTFYKNEDEILPRLESLGLSPENARALAPLSFSGTAHLSLSALGKLLPHLEEGKSYTQARADAGYAAPPPDRHPKLPPLEEADWRNPVVFRALTQTRKVVNALVRRYGPPWCIHLETARELSQPAKVRRRIETEQQANEKKKQQAEREFLDIVGTAPGPGDLLKMRLWREQGGFCPYCEEYLNPTRLAEPGYAEMDHILPYSRSLDNGWHNRVLVHGKDNRDKGNRTPFEAFGGDTARWDRLVAWVQASHLSAPKKRNLLREDFGEEAERELKDRNLTDTRFITKTAATLLRDRLTFHPEAPKDPVMTLNGRLTAFLRKQWGLHKNRKNGDLHHALDAAVLAVASRSFVYRLSSHNAAWGELPRGREAENGFSLPYPAFRSEVLARLCPTREEILLRLDQGGVGYDEAFRNGLRPVFVSRAPSRRLRGKAHMETLRSPKWKDHPEGPRTASRIPLKDLNLEKLERMVGKDRDRKLYEALRERLAAFGGNGKKAFVAPFRKPCRSGEGPLVRSLRIFDSGYSGVELRDGGEVYAVADHESMVRVDVYAKKNRFYLVPVYVADVARGIVKNRAIVAHKSEEEWDLVDGSFDFRFSLFPGDLVEIEKKDGAYLGYYKSCHRGDGRLLLDRHDRMPRESDCGTFYVSTRKDVLSMSKYQVDPLGEIRLVGSEKPPFVL

SEQ ID NO: 358 - protein, 1233 aa, Mycoplasma canis
MEKKRKVTLGFDLGIASVGWAIVDSETNQVYKLGSRLFDAPDTNLERRTQRGTRRLLRRRKYRNQKFYNLVKRTEVFGLSSREAIENRFRELSIKYPNIIELKTKALSQEVCPDEIAWILHDYLKNRGYFYDEKETKEDFDQQTVESMPSYKLNEFYKKYGYFKGALSQPTESEMKDNKDLKEAFFFDFSNKEWLKEINYFFNVQKNILSETFIEEFKKIFSFTRDISKGPGSDNMPSPYGIFGEFGDNGQGGRYEHIWDKNIGKCSIFTNEQRAPKYLPSALIFNFLNELANIRLYSTDKKNIQPLWKLSSVDKLNILLNLFNLPISEKKKKLTSTNINDIVKKESIKSIMISVEDIDMIKDEWAGKEPNVYGVGLSGLNIEESAKENKFKFQDLKILNVLINLLDNVGIKFEFKDRNDIIKNLELLDNLYLFLIYQKESNNKDSSIDLFIAKNESLNIENLKLKLKEFLLGAGNEFENHNSKTHSLSKKAIDEILPKLLDNNEGWNLEAIKNYDEEIKSQIEDNSSLMAKQDKKYLNDNFLKDAILPPNVKVTFQQAILIFNKIIQKFSKDFEIDKVVIELAREMTQDQENDALKGIAKAQKSKKSLVEERLEANNIDKSVFNDKYEKLIYKIFLWISQDFKDPYTGAQISVNEIVNNKVEIDHIIPYSLCFDDSSANKVLVHKQSNQEKSNSLPYEYIKQGHSGWNWDEFTKYVKRVFVNNVDSILSKKERLKKSENLLTASYDGYDKLGFLARNLNDTRYATILFRDQLNNYAEHHLIDNKKMFKVIAMNGAVTSFIRKNMSYDNKLRLKDRSDFSHHAYDAAIIALFSNKTKTLYNLIDPSLNGIISKRSEGYWVIEDRYTGEIKELKKEDWTSIKNNVQARKIAKEIEEYLIDLDDEVFFSRKTKRKTNRQLYNETIYGIATKTDEDGITNYYKKEKFSILDDKDIYLRLLREREKFVINQSNPEVIDQIIEIIESYGKENNIPSRDEAINIKYTKNKINYNLYLKQYMRSLTKSLDQFSEEFINQMIANKTFVLYNPTKNTTRKIKFLRLVNDVKINDIRKNQVINKFNGKNNEPKAFYENINSLGAIVFKNSANNFKTLSINTQIAIFGDKNWDIEDFKTYNMEKIEKYKEIYGIDKTYNFHSFIFPGTILLDKQNKEFYYISSIQTVRDIIEIKFLNKIEFKDENKNQDTSKTPKRLMFGIKSIMNNYEQVDISPFGINKKIFE

SEQ ID NO: 359 - protein, 1119 aa, Lactobacillus coryniformis
MGYRIGLDVGITSTGYAVLKTDKNGLPYKILTLDSVIYPRAENPQTGASLAEPRRIKRGLRRRTRRTKFRKQRTQQLFIHSGLLSKPEIEQILATPQAKYSVYELRVAGLDRRLTNSELFRVLYFFIGHRGFKSNRKAELNPENEADKKQMGQLLNSIEEIRKAIAEKGYRTVGELYLKDPKYNDHKRNKGYIDGYLSTPNRQMLVDEIKQILDKQRELGNEKLTDEFYATYLLGDENRAGIFQAQRDFDEGPGAGPYAGDQIKKMVGKDIFEPTEDRAAKATYTFQYFNLLQKMTSLNYQNTTGDTWHTLNGLDRQAIIDAVFAKAEKPTKTYKPTDFGELRKLLKLPDDARFNLVNYGSLQTQKEIETVEKKTRFVDFKAYHDLVKVLPEEMWQSRQLLDHIGTALTLYSSDKRRRRYFAEELNLPAELIEKLLPLNFSKFGHLSIKSMQNIIPYLEMGQVYSEATTNTGYDFRKKQISKDTIREEITNPVVRRAVTKTIKIVEQIIRRYGKPDGINIELARELGRNFKERGDIQKRQDKNRQTNDKIAAELTELGIPVNGQNIIRYKLHKEQNGVDPYTGDQIPFERAFSEGYEVDHIIPYSISWDDSYTNKVLTSAKCNREKGNRIPMVYLANNEQRLNALTNIADNIIRNSRKRQKLLKQKLSDEELKDWKQRNINDTRFITRVLYNYFRQAIEFNPELEKKQRVLPLNGEVTSKIRSRWGFLKVREDGDLHHAIDATVIAAITPKFIQQVTKYSQHQEVKNNQALWHDAEIKDAEYAAEAQRMDADLFNKIFNGFPLPWPEFLDELLARISDNPVEMMKSRSWNTYTPIEIAKLKPVFVVRLANHKISGPAHLDTIRSAKLFDEKGIVLSRVSITKLKINKKGQVATGDGIYDPENSNNGDKVVYSAIRQALEAHNGSGELAFPDGYLEYVDHGTKKLVRKVRVAKKVSLPVRLKNKAAADNGSMVRIDVFNTGKKFVFVPIYIKDTVEQVLPNKAIARGKSLWYQITESDQFCFSLYPGDMVHIESKTGIKPKYSNKENNTSVVPIKNFYGYFDGADIATASILVRAHDSSYTARSIGIAGLLKFEKYQVDYFGRYHKVHEKKRQLFVKRDE

SEQ ID NO: 360 - protein, 1195 aa, Elusimicrobium minutum
MQKNINTKQNHIYIKQAQKIKEKLGDKPYRIGLDLGVGSIGFAIVSMEENDGNVLLPKEIIMVGSRIFKASAGAADRKLSRGQRNNHRHTRERMRYLWKVLAEQKLALPVPADLDRKENSSEGETSAKRFLGDVLQKDIYELRVKSLDERLSLQELGYVLYHIAGHRGSSAIRTFENDSEEAQKENTENKKIAGNIKRLMAKKNYRTYGEYLYKEFFENKEKHKREKISNAANNHKFSPTRDLVIKEAEAILKKQAGKDGFHKELTEEYIEKLTKAIGYESEKLIPESGFCPYLKDEKRLPASHKLNEERRLWETLNNARYSDPIVDIVTGEITGYYEKQFTKEQKQKLFDYLLTGSELTPAQTKKLLGLKNTNFEDIILQGRDKKAQKIKGYKLIKLESMPFWARLSEAQQDSFLYDWNSCPDEKLLTEKLSNEYHLTEEEIDNAFNEIVLSSSYAPLGKSAMLIILEKIKNDLSYTEAVEEALKEGKLTKEKQAIKDRLPYYGAVLQESTQKIIAKGFSPQFKDKGYKTPHTNKYELEYGRIANPVVHQTLNELRKLVNEIIDILGKKPCEIGLETARELKKSAEDRSKLSREQNDNESNRNRIYEIYIRPQQQVIITRRENPRNYILKFELLEEQKSQCPFCGGQISPNDIINNQADIEHLFPIAESEDNGRNNLVISHSACNADKAKRSPWAAFASAAKDSKYDYNRILSNVKENIPHKAWRFNQGAFEKFIENKPMAARFKTDNSYISKVAHKYLACLFEKPNIICVKGSLTAQLRMAWGLQGLMIPFAKQLITEKESESFNKDVNSNKKIRLDNRHHALDAIVIAYASRGYGNLLNKMAGKDYKINYSERNWLSKILLPPNNIVWENIDADLESFESSVKTALKNAFISVKHDHSDNGELVKGTMYKIFYSERGYTLTTYKKLSALKLTDPQKKKTPKDFLETALLKFKGRESEMKNEKIKSAIENNKRLFDVIQDNLEKAKKLLEEENEKSKAEGKKEKNINDASIYQKAISLSGDKYVQLSKKEPGKFFAISKPTPTTTGYGYDTGDSLCVDLYYDNKGKLCGEIIRKIDAQQKNPLKYKEQGFTLFERIYGGDILEVDFDIHSDKNSFRNNTGSAPENRVFIKVGTFTEITNNNIQIWFGNIIKSTGGQDDSFTINSMQQYNPRKLILSSCGFIKYRSPILKNKEG

SEQ ID NO: 361 - protein, 1082 aa, Neisseria meningitidis; identical to SEQ ID NO: 25

SEQ ID NO: 362 - protein, 1056 aa, Pasteurella multocida
MQTTNLSYILGLDLGIASVGWAVVEINENEDPIGLIDVGVRIFERAEVPKTGESLALSRRLARSTRRLIRRRAHRLLLAKRFLKREGILSTIDLEKGLPNQAWELRVAGLERRLSAIEWGAVLLHLIKHRGYLSKRKNESQTNNKELGALLSGVAQNHQLLQSDDYRTPAELALKKFAKEEGHIRNQRGAYTHTFNRLDLLAELNLLFAQQHQFGNPHCKEHIQQYMTELLMWQKPALSGEAILKMLGKCTHEKNEFKAAKHTYSAERFVWLTKLNNLRILEDGAERALNEEERQLLINHPYEKSKLTYAQVRKLLGLSEQAIFKHLRYSKENAESATFMELKAWHAIRKALENQGLKDTWQDLAKKPDLLDEIGTAFSLYKTDEDIQQYLTNKVPNSVINALLVSLNFDKFIELSLKSLRKILPLMEQGKRYDQACREIYGHHYGEANQKTSQLLPAIPAQEIRNPVVLRTLSQARKVINAIIRQYGSPARVHIETGRELGKSFKERREIQKQQEDNRTKRESAVQKFKELFSDFSSEPKSKDILKFRLYEQQHGKCLYSGKEINIHRLNEKGYVEIDHALPFSRTWDDSFNNKVLVLASENQNKGNQTPYEWLQGKINSERWKNFVALVLGSQCSAAKKQRLLTQVIDDNKFIDRNLNDTRYIARFLSNYIQENLLLVGKNKKNVFTPNGQITALLRSRWGLIKARENNNRHHALDAIVVACATPSMQQKITRFIRFKEVHPYKIENRYEMVDQESGEIISPHFPEPWAYFRQEVNIRVFDNHPDTVLKEMLPDRPQANHQFVQPLFVSRAPTRKMSGQGHMETIKSAKRLAEGISVLRIPLTQLKPNLLENMVNKEREPALYAGLKARLAEFNQDPAKAFATPFYKQGGQQVKAIRVEQVQKSGVLVRENNGVADNASIVRTDVFIKNNKFFLVPIYTWQVAKGILPNKAIVAHKNEDEWEEMDEGAKFKFSLFPNDLVELKTKKEYFFGYYIGLDRATGNISLKEHDGEISKGKDGVYRVGVKLALSFEKYQVDELGKNRQICRPQQRQPVR

SEQ ID NO: 363 - protein, 1059 aa, Rhodovulum sp.
MGIRFAFDLGTNSIGWAVWRTGPGVFGEDTAASLDGSGVLIFKDGRNPKDGQSLATMRRVPRQSRKRRDRFVLRRRDLLAALRKAGLFPVDVEEGRRLAATDPYHLRAKALDESLTPHEMGRVIFHLNQRRGFRSNRKADRQDREKGKIAEGSKRLAETLAATNCRTLGEFLWSRHRGTPRTRSPTRIRMEGEGAKALYAFYPTREMVRAEFERLWTAQSRFAPDLLTPERHEEIAGILFRQRDLAPPKIGCCTFEPSERRLPRALPSVEARGIYERLAHLRITTGPVSDRGLTRPERDVLASALLAGKSLTFKAVRKTLKILPHALVNFEEAGEKGLDGALTAKLLSKPDHYGAAWHGLSFAEKDTFVGKLLDEADEERLIRRLVTENRLSEDAARRCASIPLADGYGRLGRTANTEILAALVEETDETGTVVTYAEAVRRAGERTGRNWHHSDERDGVILDRLPYYGEILQRHVVPGSGEPEEKNEAARWGRLANPTVHIGLNQLRKVVNRLIAAHGRPDQIVVELARELKLNREQKERLDRENRKNREENERRTAILAEHGQRDTAENKIRLRLFEEQARANAGIALCPYTGRAIGIAELFTSEVEIDHILPVSLTLDDSLANRVLCRREANREKRRQTPFQAFGATPAWNDIVARAAKLPPNKRWRFDPAALERFEREGGFLGRQLNETKYLSRLAKIYLGKICDPDRVYVTPGTLTGLLRARWGLNSILSDSNFKNRSDHRHHAVDAVVIGVLTRGMIQRIAHDAARAEDQDLDRVFRDVPVPFEDFRDHVRERVSTITVAVKPEHGKGGALHEDTSYGLVPDTDPNAALGNLVVRKPIRSLTAGEVDRVRDRALRARLGALAAPFRDESGRVRDAKGLAQALEAFGAENGIRRVRILKPDASVVTIADRRTGVPYRAVAPGENHHVDIVQMRDGSWRGFAASVFEVNRPGWRPEWEVKKLGGKLVMRLHKGDMVELSDKDGQRRVKVVQQIEISANRVRLSPHNDGGKLQDRHADADDPFRWDLATIPLLKDRGCVAVRVDPIGVVTLRRSNV

SEQ ID NO: 364 - protein, 1096 aa, Eubacterium dolichum
MMEVFMGRLVLGLDIGITSVGFGIIDLDESEIVDYGVRLFKEGTAAENETRRTKRGGRRLKRRRVTRREDMLHLLKQAGIISTSFHPLNNPYDVRVKGLNERLNGEELATALLHLCKHRGSSVETIEDDEAKAKEAGETKKVLSMNDQLLKSGKYVCEIQKERLRTNGHIRGHENNFKTRAYVDEAFQILSHQDLSNELKSAIITIISRKRMYYDGPGGPLSPTPYGRYTYFGQKEPIDLIEKMRGKCSLFPNEPRAPKLAYSAELFNLLNDLNNLSIEGEKLTSEQKAMILKIVHEKGKITPKQLAKEVGVSLEQIRGFRIDTKGSPLLSELTGYKMIREVLEKSNDEHLEDHVFYDEIAEILTKTKDIEGRKKQISELSSDLNEESVHQLAGLTKFTAYHSLSFKALRLINEEMLKTELNQMQSITLFGLKQNNELSVKGMKNIQADDTAILSPVAKRAQRETFKVVNRLREIYGEFDSIVVEMAREKNSEEQRKAIRERQKFFEMRNKQVADIIGDDRKINAKLREKLVLYQEQDGKTAYSLEPIDLKLLIDDPNAYEVDHIIPISISLDDSITNKVLVTHRENQEKGNLTPISAFVKGRFTKGSLAQYKAYCLKLKEKNIKTNKGYRKKVEQYLLNENDIYKYDIQKEFINRNLVDTSYASRVVLNTLTTYFKQNEIPTKVFTVKGSLTNAFRRKINLKKDRDEDYGHHAIDALIIASMPKMRLLSTIFSRYKIEDIYDESTGEVFSSGDDSMYYDDRYFAFIASLKAIKVRKFSHKIDTKPNRSVADETIYSTRVIDGKEKVVKKYKDIYDPKFTALAEDILNNAYQEKYLMALHDPQTFDQIVKVVNYYFEEMSKSEKYFTKDKKGRIKISGMNPLSLYRDEHGMLKKYSKKGDGPAITQMKYFDGVLGNHIDISAHYQVRDKKVVLQQISPYRTDFYYSKENGYKFVTIRYKDVRWSEKKKKYVIDQQDYAMKKAEKKIDDTYEFQFSMHRDELIGITKAEGEALIYPDETWHNFNFFFHAGETPEILKFTATNNDKSNKIEVKPIHCYCKMRLMPTISKKIVRIDKYATDVVGNLYKVKKNTLKFEFD

SEQ ID NO: 365 - protein, 1132 aa, Nitratifractor salsuginis
MKKILGVDLGITSFGYAILQETGKDLYRCLDNSVVMRNNPYDEKSGESSQSIRSTQKSMRRLIEKRKKRIRCVAQTMERYGILDYSETMKINDPKNNPIKNRWQLRAVDAWKRPLSPQELFAIFAHMAKHRGYKSIATEDLIYELELELGLNDPEKESEKKADERRQVYNALRHLEELRKKYGGETIAQTIHRAVEAGDLRSYRNHDDYEKMIRREDIEEEIEKVLLRQAELGALGLPEEQVSELIDELKACITDQEMPTIDESLFGKCTFYKDELAAPAYSYLYDLYRLYKKLADLNIDGYEVTQEDREKVIEWVEKKIAQGKNLKKITHKDLRKILGLAPEQKIFGVEDERIVKGKKEPRTFVPFFFLADIAKFKELFASIQKHPDALQIFRELAEILQRSKTPQEALDRLRALMAGKGIDTDDRELLELFKNKRSGTRELSHRYILEALPLFLEGYDEKEVQRILGFDDREDYSRYPKSLRHLHLREGNLFEKEENPINNHAVKSLASWALGLIADLSWRYGPFDEIILETTRDALPEKIRKEIDKAMREREKALDKIIGKYKKEFPSIDKRLARKIQLWERQKGLDLYSGKVINLSQLLDGSADIEHIVPQSLGGLSTDYNTIVTLKSVNAAKGNRLPGDWLAGNPDYRERIGMLSEKGLIDWKKRKNLLAQSLDEIYTENTHSKGIRATSYLEALVAQVLKRYYPFPDPELRKNGIGVRMIPGKVTSKTRSLLGIKSKSRETNFHHAEDALILSTLTRGWQNRLHRMLRDNYGKSEAELKELWKKYMPHIEGLTLADYIDEAFRRFMSKGEESLFYRDMFDTIRSISYWVDKKPLSASSHKETVYSSRHEVPTLRKNILEAFDSLNVIKDRHKLTTEEFMKRYDKEIRQKLWLHRIGNTNDESYRAVEERATQIAQILTRYQLMDAQNDKEIDEKFQQALKELITSPIEVTGKLLRKMRFVYDKLNAMQIDRGLVETDKNMLGIHISKGPNEKLIFRRMDVNNAHELQKERSGILCYLNEMLFIFNKKGLIHYGCLRSYLEKGQGSKYIALFNPRFPANPKAQPSKFTSDSKIKQVGIGSATGIIKAHLDLDGHVRSYEVFGTLPEGSIEWFKEESGYGRVEDDPHH

SEQ ID NO: 366 - protein, 1173 aa, Rhodospirillum rubrum
MRPIEPWILGLDIGTDSLGWAVFSCEEKGPPTAKELLGGGVRLFDSGRDAKDHTSRQAERGAFRRARRQTRTWPWRRDRLIALFQAAGLTPPAAETRQIALALRREAVSRPLAPDALWAALLHLAHHRGFRSNRIDKRERAAAKALAKAKPAKATAKATAPAKEADDEAGFWEGAEAALRQRMAASGAPTVGALLADDLDRGQPVRMRYNQSDRDGVVAPTRALIAEELAEIVARQSSAYPGLDWPAVTRLVLDQRPLRSKGAGPCAFLPGEDRALRALPTVQDFIIRQTLANLRLPSTSADEPRPLTDEEHAKALALLSTARFVEWPALRRALGLKRGVKFTAETERNGAKQAARGTAGNLTEAILAPLIPGWSGWDLDRKDRVFSDLWAARQDRSALLALIGDPRGPTRVTEDETAEAVADAIQIVLPTGRASLSAKAARAIAQAMAPGIGYDEAVTLALGLHHSHRPRQERLARLPYYAAALPDVGLDGDPVGPPPAEDDGAAAEAYYGRIGNISVHIALNETRKIVNALLHRHGPILRLVMVETTRELKAGADERKRMIAEQAERERENAEIDVELRKSDRWMANARERRQRVRLARRQNNLCPYTSTPIGHADLLGDAYDIDHVIPLARGGRDSLDNMVLCQSDANKTKGDKTPWEAFHDKPGWIAQRDDFLARLDPQTAKALAWRFADDAGERVARKSAEDEDQGFLPRQLTDTGYIARVALRYLSLVTNEPNAVVATNGRLTGLLRLAWDITPGPAPRDLLPTPRDALRDDTAARRFLDGLTPPPLAKAVEGAVQARLAALGRSRVADAGLADALGLTLASLGGGGKNRADHRHHFIDAAMIAVTTRGLINQINQASGAGRILDLRKWPRTNFEPPYPTFRAEVMKQWDHIHPSIRPAHRDGGSLHAATVFGVRNRPDARVLVQRKPVEKLFLDANAKPLPADKIAEIIDGFASPRMAKRFKALLARYQAAHPEVPPALAALAVARDPAFGPRGMTANTVIAGRSDGDGEDAGLITPFRANPKAAVRTMGNAVYEVWEIQVKGRPRWTHRVLTRFDRTQPAPPPPPENARLVMRLRRGDLVYWPLESGDRLFLVKKMAVDGRLALWPARLATGKATALYAQLSCPNINLNGDQGYCVQSAEGIRKEKIRTTSCTALGRLRLSKKAT

SEQ ID NO: 367 - protein, 1021 aa, Clostridium cellulolyticum
MKYTLGLDVGIASVGWAVIDKDNNKIIDLGVRCFDKAEESKTGESLATARRIARGMRRRISRRSQRLRLVKKLFVQYEIIKDSSEFNRIFDTSRDGWKDPWELRYNALSRILKPYELVQVLTHITKRRGFKSNRKEDLSTTKEGVVITSIKNNSEMLRTKNYRTIGEMIFMETPENSNKRNKVDEYIHTIAREDLLNEIKYIFSIQRKLGSPFVTEKLEHDFLNIWEFQRPFASGDSILSKVGKCTLLKEELRAPTSCYTSEYFGLLQSINNLVLVEDNNTLTLNNDQRAKIIEYAHFKNEIKYSEIRKLLDIEPEILFKAHNLTHKNPSGNNESKKFYEMKSYHKLKSTLPTDIWGKLHSNKESLDNLFYCLTVYKNDNEIKDYLQANNLDYLIEYIAKLPTFNKFKHLSLVAMKRIIPFMEKGYKYSDACNMAELDFTGSSKLEKCNKLTVEPIIENVTNPVVIRALTQARKVINAIIQKYGLPYMVNIELAREAGMTRQDRDNLKKEHENNRKAREKISDLIRQNGRVASGLDILKWRLWEDQGGRCAYSGKPIPVCDLLNDSLTQIDHIYPYSRSMDDSYMNKVLVLTDENQNKRSYTPYEVWGSTEKWEDFEARIYSMHLPQSKEKRLLNRNFITKDLDSFISRNLNDTRYISRFLKNYIESYLQFSNDSPKSCVVCVNGQCTAQLRSRWGLNKNREESDLHHALDAAVIACADRKIIKEITNYYNERENHNYKVKYPLPWHSFRQDLMETLAGVFISRAPRRKITGPAHDETIRSPKHFNKGLTSVKIPLTTVTLEKLETMVKNTKGGISDKAVYNVLKNRLIEHNNKPLKAFAEKIYKPLKNGTNGAIIRSIRVETPSYTGVFRNEGKGISDNSLMVRVDVFKKKDKYYLVPIYVAHMIKKELPSKAIVPLKPESQWELIDSTHEFLFSLYQNDYLVIKTKKGITEGYYRSCHRGTGSLSLMPHFANNKNVKIDIGVRTAISIEKYNVDILGNKSIVKGEPRRGMEKYNSFKSN

SEQ ID NO: 368 - protein, 1024 aa, Helicobacter mustelae
MIRTLGIDIGIASIGWAVIEGEYTDKGLENKEIVASGVRVFTKAENPKNKESLALPRTLARSARRRNARKKGRIQQVKHYLSKALGLDLECFVQGEKLATLFQTSKDFLSPWELRERALYRVLDKEELARVILHIAKRRGYDDITYGVEDNDSGKIKKAIAENSKRIKEEQCKTIGEMMYKLYFQKSLNVRNKKESYNRCVGRSELREELKTIFQIQQELKSPWVNEELIYKLLGNPDAQSKQEREGLIFYQRPLKGFGDKIGKCSHIKKGENSPYRACKHAPSAEEFVALTKSINFLKNLTNRHGLCFSQEDMCVYLGKILQEAQKNEKGLTYSKLKLLLDLPSDFEFLGLDYSGKNPEKAVFLSLPSTFKLNKITQDRKTQDKIANILGANKDWEAILKELESLQLSKEQIQTIKDAKLNFSKHINLSLEALYHLLPLMREGKRYDEGVEILQERGIFSKPQPKNRQLLPPLSELAKEESYFDIPNPVLRRALSEFRKVVNALLEKYGGFHYFHIELTRDVCKAKSARMQLEKINKKNKSENDAASQLLEVLGLPNTYNNRLKCKLWKQQEEYCLYSGEKITIDHLKDQRALQIDHAFPLSRSLDDSQSNKVLCLTSSNQEKSNKTPYEWLGSDEKKWDMYVGRVYSSNFSPSKKRKLTQKNFKERNEEDFLARNLVDTGYIGRVTKEYIKHSLSFLPLPDGKKEHIRIISGSMTSTMRSFWGVQEKNRDHHLHHAQDAIIIACIEPSMIQKYTTYLKDKETHRLKSHQKAQILREGDHKLSLRWPMSNFKDKIQESIQNIIPSHHVSHKVTGELHQETVRTKEFYYQAFGGEEGVKKALKFGKIREINQGIVDNGAMVRVDIFKSKDKGKFYAVPIYTYDFAIGKLPNKAIVQGKKNGIIKDWLEMDENYEFCFSLFKNDCIKIQTKEMQEAVLAIYKSTNSAKATIELEHLSKYALKNEDEEKMFTDTDKEKNKTMTRESCGIQGLKVFQKVKLSVLGEVLEHKPRNRQNIALKTTPKHV

SEQ ID NO: 369 - protein, 1092 aa, Ilyobacter polytropus
MKYSIGLDIGIASVGWSVINKDKERIEDMGVRIFQKAENPKDGSSLASSRREKRGSRRRNRRKKHRLDRIKNILCESGLVKKNEIEKIYKNAYLKSPWELRAKSLEAKISNKEIAQILLHIAKRRGFKSFRKTDRNADDTGKLLSGIQENKKIMEEKGYLTIGDMVAKDPKFNTHVRNKAGSYLFSFSRKLLEDEVRKIQAKQKELGNTHFTDDVLEKYIEVFNSQRNFDEGPSKPSPYYSEIGQIAKMIGNCTFESSEKRTAKNTWSGERFVFLQKLNNFRIVGLSGKRPLTEEERDIVEKEVYLKKEVRYEKLRKILYLKEEERFGDLNYSKDEKQDKKTEKTKFISLIGNYTIKKLNLSEKLKSEIEEDKSKLDKIIEILTFNKSDKTIESNLKKLELSREDIEILLSEEFSGTLNLSLKAIKKILPYLEKGLSYNEACEKADYDYKNNGIKFKRGELLPVVDKDLIANPVVLRAISQTRKVVNAIIRKYGTPHTIHVEVARDLAKSYDDRQTIIKENKKRELENEKTKKFISEEFGIKNVKGKLLLKYRLYQEQEGRCAYSRKELSLSEVILDESMTDIDHIIPYSRSMDDSYSNKVLVLSGENRKKSNLLPKEYFDRQGRDWDTFVLNVKAMKIHPRKKSNLLKEKFTREDNKDWKSRALNDTRYISRFVANYLENALEYRDDSPKKRVFMIPGQLTAQLRARWRLNKVRENGDLHHALDAAVVAVTDQKAINNISNISRYKELKNCKDVIPSIEYHADEETGEVYFEEVKDTRFPMPWSGFDLELQKRLESENPREEFYNLLSDKRYLGWFNYEEGFIEKLRPVFVSRMPNRGVKGQAHQETIRSSKKISNQIAVSKKPLNSIKLKDLEKMQGRDTDRKLYEALKNRLEEYDDKPEKAFAEPFYKPTNSGKRGPLVRGIKVEEKQNVGVYVNGGQASNGSMVRIDVFRKNGKFYTVPIYVHQTLLKELPNRAINGKPYKDWDLIDGSFEFLYSFYPNDLIEIEFGKSKSIKNDNKLTKTEIPEVNLSEVLGYYRGMDTSTGAATIDTQDGKIQMRIGIKTVKNIKKYQVDVLGNVYKVKREKRQTF

SEQ ID NO: 370 - protein, 1179 aa, Sphaerochaeta globus
MSKKVSRRYEEQAQEICQRLGSRPYSIGLDLGVGSIGVAVAAYDPIKKQPSDLVFVSSRIFIPSTGAAERRQKRGQRNSLRHRANRLKFLWKLLAERNLMLSYSEQDVPDPARLRFEDAVVRANPYELRLKGLNEQLTLSELGYALYHIANHRGSSSVRTFLDEEKSSDDKKLEEQQAMTEQLAKEKGISTFIEVLTAFNTNGLIGYRNSESVKSKGVPVPTRDIISNEIDVLLQTQKQFYQEILSDEYCDRIVSAILFENEKIVPEAGCCPYFPDEKKLPRCHFLNEERRLWEAINNARIKMPMQEGAAKRYQSASFSDEQRHILFHIARSGTDITPKLVQKEFPALKTSIIVLQGKEKAIQKIAGFRFRRLEEKSFWKRLSEEQKDDFFSAWTNTPDDKRLSKYLMKHLLLTENEVVDALKTVSLIGDYGPIGKTATQLLMKHLEDGLTYTEALERGMETGEFQELSVWEQQSLLPYYGQILTGSTQALMGKYWHSAFKEKRDSEGFFKPNTNSDEEKYGRIANPVVHQTLNELRKLMNELITILGAKPQEITVELARELKVGAEKREDIIKQQTKQEKEAVLAYSKYCEPNNLDKRYIERFRLLEDQAFVCPYCLEHISVADIAAGRADVDHIFPRDDTADNSYGNKVVAHRQCNDIKGKRTPYAAFSNTSAWGPIMHYLDETPGMWRKRRKFETNEEEYAKYLQSKGFVSRFESDNSYIAKAAKEYLRCLFNPNNVTAVGSLKGMETSILRKAWNLQGIDDLLGSRHWSKDADTSPTMRKNRDDNRHHGLDAIVALYCSRSLVQMINTMSEQGKRAVEIEAMIPIPGYASEPNLSFEAQRELFRKKILEFMDLHAFVSMKTDNDANGALLKDTVYSILGADTQGEDLVFVVKKKIKDIGVKIGDYEEVASAIRGRITDKQPKWYPMEMKDKIEQLQSKNEAALQKYKESLVQAAAVLEESNRKLIESGKKPIQLSEKTISKKALELVGGYYYLISNNKRTKTFVVKEPSNEVKGFAFDTGSNLCLDFYHDAQGKLCGEIIRKIQAMNPSYKPAYMKQGYSLYVRLYQGDVCELRASDLTEAESNLAKTTHVRLPNAKPGRTFVIIITFTEMGSGYQIYFSNLAKSKKGQDTSFTLTTIKNYDVRKVQLSSAGLVRYVSPLLVDKIEKDEVALCGE

SEQ ID NO: 371 - protein, 1054 aa, Staphylococcus lugdunensis
MNQKFILGLDIGITSVGYGLIDYETKNIIDAGVRLFPEANVENNEGRRSKRGSRRLKRRRIHRLERVKKLLEDYNLLDQSQIPQSTNPYAIRVKGLSEALSKDELVIALLHIAKRRGIHKIDVIDSNDDVGNELSTKEQLNKNSKLLKDKFVCQIQLERMNEGQVRGEKNRFKTADIIKEIIQLLNVQKNFHQLDENFINKYIELVEMRREYFEGPGKGSPYGWEGDPKAWYETLMGHCTYFPDELRSVKYAYSADLFNALNDLNNLVIQRDGLSKLEYHEKYHIIENVFKQKKKPTLKQIANEINVNPEDIKGYRITKSGKPQFTEFKLYHDLKSVLFDQSILENEDVLDQIAEILTIYQDKDSIKSKLTELDILLNEEDKENIAQLTGYTGTHRLSLKCIRLVLEEQWYSSRNQMEIFTHLNIKPKKINLTAANKIPKAMIDEFILSPVVKRTFGQAINLINKIIEKYGVPEDIIIELARENNSKDKQKFINEMQKKNENTRKRINEIIGKYGNQNAKRLVEKIRLHDEQEGKCLYSLESIPLEDLLNNPNHYEVDHIIPRSVSFDNSYHNKVLVKQSENSKKSNLTPYQYFNSGKSKLSYNQFKQHILNLSKSQDRISKKKKEYLLEERDINKFEVQKEFINRNLVDTRYATRELTNYLKAYFSANNMNVKVKTINGSFTDYLRKVWKFKKERNHGYKHHAEDALIIANADFLFKENKKLKAVNSVLEKPEIESKQLDIQVDSEDNYSEMFIIPKQVQDIKDFRNFKYSHRVDKKPNRQLINDTLYSTRKKDNSTYIVQTIKDIYAKDNTTLKKQFDKSPEKFLMYQHDPRTFEKLEVIMKQYANEKNPLAKYHEETGEYLTKYSKKNNGPIVKSLKYIGNKLGSHLDVTHQFKSSTKKLVKLSIKPYRFDVYLTDKGYKFITISYLDVLKKDNYYYIPEQKYDKLKLGKAIDKNAKFIASFYKNDLIKLDGEIYKIIGVNSDTRNMIELDLPDIRYKEYCELNNIKGEPRIKKTIGKKVNSIEKLTTDVLGNVFTNTQYTKPQLLFKRGN

SEQ ID NO: 372 - protein, 1061 aa, Treponema sp.
MIMKLEKWRLGLDLGTNSIGWSVFSLDKDNSVQDLIDMGVRIFSDGRDPKTKEPLAVARRTARSQRKLIYRRKLRRKQVFKFLQEQGLFPKTKEECMTLKSLNPYELRIKALDEKLEPYELGRALFNLAVRRGFKSNRKDGSREEVSEKKSPDEIKTQADMQTHLEKAIKENGCRTITEFLYKNQGENGGIRFAPGRMTYYPTRKMYEEEFNLIRSKQEKYYPQVDWDDIYKAIFYQRPLKPQQRGYCIYENDKERTFKAMPCSQKLRILQDIGNLAYYEGGSKKRVELNDNQDKVLYELLNSKDKVTFDQMRKALCLADSNSFNLEENRDFLIGNPTAVKMRSKNRFGKLWDEIPLEEQDLIIETIITADEDDAVYEVIKKYDLTQEQRDFIVKNTILQSGTSMLCKEVSEKLVKRLEEIADLKYHEAVESLGYKFADQTVEKYDLLPYYGKVLPGSTMEIDLSAPETNPEKHYGKISNPTVHVALNQTRVVVNALIKEYGKPSQIAIELSRDLKNNVEKKAEIARKQNQRAKENIAINDTISALYHTAFPGKSFYPNRNDRMKYRLWSELGLGNKCIYCGKGISGAELFTKEIEIEHILPFSRTLLDAESNLTVAHSSCNAFKAERSPFEAFGTNPSGYSWQEIIQRANQLKNTSKKNKFSPNAMDSFEKDSSFIARQLSDNQYIAKAALRYLKCLVENPSDVWTTNGSMTKLLRDKWEMDSILCRKFTEKEVALLGLKPEQIGNYKKNRFDHRHHAIDAVVIGLTDRSMVQKLATKNSHKGNRIEIPEFPILRSDLIEKVKNIVVSFKPDHGAEGKLSKETLLGKIKLHGKETFVCRENIVSLSEKNLDDIVDEIKSKVKDYVAKHKGQKIEAVLSDFSKENGIKKVRCVNRVQTPIEITSGKISRYLSPEDYFAAVIWEIPGEKKTFKAQYIRRNEVEKNSKGLNVVKPAVLENGKPHPAAKQVCLLHKDDYLEFSDKGKMYFCRIAGYAATNNKLDIRPVYAVSYCADWINSTNETMLTGYWKPTPTQNWVSVNVLFDKQKARLVTVSPIGRVFRK

SEQ ID NO: 373 - protein, 1011 aa, Unknown
  Uncultured delta polypeptide
MSSKAIDSLEQLDLFKPQEYTLGLDLGIKSIGWAILSGERIANAGVYLFETAEELNSTGNKLISKAAERGRKRRIRRMLDRKARRGRHIRYLLEREGLPTDELEEVVVHQSNRTLWDVRAEAVERKLTKQELAAVLFHLVRHRGYFPNTKKLPPDDESDSADEEQGKINRATSRLREELKASDCKTIGQFLAQNRDRQRNREGDYSNLMARKLVFEEALQILAFQRKQGHELSKDFEKTYLDVLMGQRSGRSPKLGNCSLIPSELRAPSSAPSTEWFKFLQNLGNLQISNAYREEWSIDAPRRAQIIDACSQRSTSSYWQIRRDFQIPDEYRFNLVNYERRDPDVDLQEYLQQQERKTLANFRNWKQLEKIIGTGHPIQTLDEAARLITLIKDDEKLSDQLADLLPEASDKAITQLCELDFTTAAKISLEAMYRILPHMNQGMGFFDACQQESLPEIGVPPAGDRVPPFDEMYNPVVNRVLSQSRKLINAVIDEYGMPAKIRVELARDLGKGRELRERIKLDQLDKSKQNDQRAEDFRAEFQQAPRGDQSLRYRLWKEQNCTCPYSGRMIPVNSVLSEDTQIDHILPISQSFDNSLSNKVLCFTEENAQKSNRTPFEYLDAADFQRLEAISGNWPEAKRNKLLHKSFGKVAEEWKSRALNDTRYLTSALADHLRHHLPDSKIQTVNGRITGYLRKQWGLEKDRDKHTHHAVDAIVVACTTPAIVQQVTLYHQDIRRYKKLGEKRPTPWPETFRQDVLDVEEEIFITRQPKKVSGGIQTKDTLRKHRSKPDRQRVALTKVKLADLERLVEKDASNRNLYEHLKQCLEESGDQPTKAFKAPFYMPSGPEAKQRPILSKVTLLREKPEPPKQLTELSGGRRYDSMAQGRLDIYRYKPGGKRKDEYRVVLQRMIDLMRGEENVHVFQKGVPYDQGPEIEQNYTFLFSLYFDDLVEFQRSADSEVIRGYYRTFNIANGQLKISTYLEGRQDFDFFGANRLAHFAKVQVNLLGKVIK

SEQ ID NO: 374 - protein, 1029 aa, Alicycliphilus denitrificans
MRSLRYRLALDLGSTSLGWALFRLDACNRPTAVIKAGVRIFSDGRNPKDGSSLAVTRRAARAMRRRRDRLLKRKTRMQAKLVEHGFFPADAGKRKALEQLNPYALRAKGLQEALLPGEFARALFHINQRRGFKSNRKTDKKDNDSGVLKKAIGQLRQQMAEQGSRTVGEYLWTRLQQGQGVRARYREKPYTTEEGKKRIDKSYDLYIDRAMIEQEFDALWAAQAAFNPTLFHEAARADLKDTLLHQRPLRPVKPGRCTLLPEEERAPLALPSTQRFRIHQEVNHLRLLDENLREVALTLAQRDAVVTALETKAKLSFEQIRKLLKLSGSVQFNLEDAKRTELKGNATSAALARKELFGAAWSGFDEALQDEIVWQLVTEEGEGALIAWLQTHTGVDEARAQAIVDVSLPEGYGNLSRKALARIVPALRAAVITYDKAVQAAGFDHHSQLGFEYDASEVEDLVHPETGEIRSVFKQLPYYGKALQRHVAFGSGKPEDPDEKRYGKIANPTVHIGLNQVRMVVNALIRRYGRPTEVVIELARDLKQSREQKVEAQRRQADNQRRNARIRRSIAEVLGIGEERVRGSDIQKWICWEELSFDAADRRCPYSGVQISAAMLLSDEVEVEHILPFSKTLDDSLNNRTVAMRQANRIKRNRTPWDARAEFEAQGWSYEDILQRAERMPLRKRYRFAPDGYERWLGDDKDFLARALNDTRYLSRVAAEYLRLVCPGTRVIPGQLTALLRGKFGLNDVLGLDGEKNRNDHRHHAVDACVIGVTDQGLMQRFATASAQARGDGLTRLVDGMPMPWPTYRDHVERAVRHIWVSHRPDHGFEGAMMEETSYGIRKDGSIKQRRKADGSAGREISNLIRIHEATQPLRHGVSADGQPLAYKGYVGGSNYCIEITVNDKGKWEGEVISTFRAYGVVRAGGMGRLRNPHEGQNGRKLIMRLVIGDSVRLEVDGAERTMRIVKISGSNGQIFMAPIHEANVDARNTDKQDAFTYTSKYAGSLQKAKTRRVTISPIGEVRDPGFKG

SEQ ID NO: 375 - protein, 1168 aa, Azospirillum sp.
MARPAFRAPRREHVNGWTPDPHRISKPFFILVSWHLLSRVVIDSSSGCFPGTSRDHTDKFAEWECAVQPYRLSFDLGTNSIGWGLLNLDRQGKPREIRALGSRIFSDGRDPQDKASLAVARRLARQMRRRRDRYLTRRTRLMGALVRFGLMPADPAARKRLEVAVDPYLARERATRERLEPFEIGRALFHLNQRRGYKPVRTATKPDEEAGKVKEAVERLEAAIAAAGAPTLGAWFAWRKTRGETLRARLAGKGKEAAYPFYPARRMLEAEFDTLWAEQARHHPDLLTAEAREILRHRIFHQRPLKPPPVGRCTLYPDDGRAPRALPSAQRLRLFQELASLRVIHLDLSERPLTPAERDRIVAFVQGRPPKAGRKPGKVQKSVPFEKLRGLLELPPGTGFSLESDKRPELLGDETGARIAPAFGPGWTALPLEEQDALVELLLTEAEPERAIAALTARWALDEATAAKLAGATLPDFHGRYGRRAVAELLPVLERETRGDPDGRVRPIRLDEAVKLLRGGKDHSDFSREGALLDALPYYGAVLERHVAFGTGNPADPEEKRVGRVANPTVHIALNQLRHLVNAILARHGRPEEIVIELARDLKRSAEDRRREDKRQADNQKRNEERKRLILSLGERPTPRNLLKLRLWEEQGPVENRRCPYSGETISMRMLLSEQVDIDHILPFSVSLDDSAANKVVCLREANRIKRNRSPWEAFGHDSERWAGILARAEALPKNKRWRFAPDALEKLEGEGGLRARHLNDTRHLSRLAVEYLRCVCPKVRVSPGRLTALLRRRWGIDAILAEADGPPPEVPAETLDPSPAEKNRADHRHHALDAVVIGCIDRSMVQRVQLAAASAEREAAAREDNIRRVLEGFKEEPWDGFRAELERRARTIVVSHRPEHGIGGALHKETAYGPVDPPEEGFNLVVRKPIDGLSKDEINSVRDPRLRRALIDRLAIRRRDANDPATALAKAAEDLAAQPASRGIRRVRVLKKESNPIRVEHGGNPSGPRSGGPFHKLLLAGEVHHVDVALRADGRRWVGHWVTLFEAHGGRGADGAAAPPRLGDGERFLMRLHKGDCLKLEHKGRVRVMQVVKLEPSSNSVVVVEPHQVKTDRSKHVKISCDQLRARGARRVTVDPLGRVRVHAPGARVGIGGDAGRTAMEPAEDIS

SEQ ID NO: 376 - protein, 1064 aa, Bradyrhizobium sp.
MKRTSLRAYRLGVDLGANSLGWFVVWLDDHGQPEGLGPGGVRIFPDGRNPQSKQSNAAGRRLARSARRRRDRYLQRRGKLMGLLVKHGLMPADEPARKRLECLDPYGLRAKALDEVLPLHHVGRALFHLNQRRGLFANRAIEQGDKDASAIKAAAGRLQTSMQACGARTLGEFLNRRHQLRATVRARSPVGGDVQARYEFYPTRAMVDAEFEAIWAAQAPHHPTMTAEAHDTIREAIFSQRAMKRPSIGKCSLDPATSQDDVDGFRCAWSHPLAQRFRIWQDVRNLAVVETGPTSSRLGKEDQDKVARALLQTDQLSFDEIRGLLGLPSDARFNLESDRRDHLKGDATGAILSARRHFGPAWHDRSLDRQIDIVALLESALDEAAIIASLGTTHSLDEAAAQRALSALLPDGYCRLGLRAIKRVLPLMEAGRTYAEAASAAGYDHALLPGGKLSPTGYLPYYGQWLQNDVVGSDDERDTNERRWGRLPNPTVHIGIGQLRRVVNELIRWHGPPAEITVELTRDLKLSPRRLAELEREQAENQRKNDKRTSLLRKLGLPASTHNLLKLRLWDEQGDVASECPYTGEAIGLERLVSDDVDIDHLIPFSISWDDSAANKVVCMRYANREKGNRTPFEAFGHRQGRPYDWADIAERAARLPRGKRWRFGPGARAQFEELGDFQARLLNETSWLARVAKQYLAAVTHPHRIHVLPGRLTALLRATWELNDLLPGSDDRAAKSRKDHRHHAIDALVAALTDQALLRRMANAHDDTRRKIEVLLPWPTFRIDLETRLKAMLVSHKPDHGLQARLHEDTAYGTVEHPETEDGANLVYRKTFVDISEKEIDRIRDRRLRDLVRAHVAGERQQGKTLKAAVLSFAQRRDIAGHPNGIRHVRLTKSIKPDYLVPIRDKAGRIYKSYNAGENAFVDILQAESGRWIARATTVFQANQANESHDAPAAQPIMRVFKGDMLRIDHAGAEKFVKIVRLSPSNNLLYLVEHHQAGVFQTRHDDPEDSFRWLFASFDKLREWNAELVRIDTLGQPWRRKRGLETGSEDATRIGWTRPKKWP

SEQ ID NO: 377 - protein, 1037 aa, Parvibaculum lavamentivorans
MERIFGFDIGTTSIGFSVIDYSSTQSAGNIQRLGVRIFPEARDPDGTPLNQQRRQKRMMRRQLRRRRIRRKALNETLHEAGFLPAYGSADWPVVMADEPYELRRRGLEEGLSAYEFGRAIYHLAQHRHFKGRELEESDTPDPDVDDEKEAANERAATLKALKNEQTTLGAWLARRPPSDRKRGIHAHRNVVAEEFERLWEVQSKFHPALKSEEMRARISDTIFAQRPVFWRKNTLGECRFMPGEPLCPKGSWLSQQRRMLEKLNNLAIAGGNARPLDAEERDAILSKLQQQASMSWPGVRSALKALYKQRGEPGAEKSLKFNLELGGESKLLGNALEAKLADMFGPDWPAHPRKQEIRHAVHERLWAADYGETPDKKRVIILSEKDRKAHREAAANSFVADFGITGEQAAQLQALKLPTGWEPYSIPALNLFLAELEKGERFGALVNGPDWEGWRRTNFPHRNQPTGEILDKLPSPASKEERERISQLRNPTVVRTQNELRKVVNNLIGLYGKPDRIRIEVGRDVGKSKREREEIQSGIRRNEKQRKKATEDLIKNGIANPSRDDVEKWILWKEGQERCPYTGDQIGFNALFREGRYEVEHIWPRSRSFDNSPRNKTLCRKDVNIEKGNRMPFEAFGHDEDRWSAIQIRLQGMVSAKGGTGMSPGKVKRFLAKTMPEDFAARQLNDTRYAAKQILAQLKRLWPDMGPEAPVKVEAVTGQVTAQLRKLWTLNNILADDGEKTRADHRHHAIDALTVACTHPGMTNKLSRYWQLRDDPRAEKPALTPPWDTIRADAEKAVSEIVVSHRVRKKVSGPLHKETTYGDTGTDIKTKSGTYRQFVTRKKIESLSKGELDEIRDPRIKEIVAAHVAGRGGDPKKAFPPYPCVSPGGPEIRKVRLTSKQQLNLMAQTGNGYADLGSNHHIAIYRLPDGKADFEIVSLFDASRRLAQRNPIVQRTRADGASFVMSLAAGEAIMIPEGSKKGIWIVQGVWASGQVVLERDTDADHSTTTRPMPNPILKDDAKKVSIDPIGRVRPSND

SEQ ID NO: 378 - protein, 1218 aa, Prevotella timonensis
MNKRILGLDTGTNSLGWAVVDWDEHAQSYELIKYGDVIFQEGVKIEKGIESSKAAERSGYKAIRKQYFRRRLRKIQVLKVLVKYHLCPYLSDDDLRQWHLQKQYPKSDELMLWQRTSDEEGKNPYYDRHRCLHEKLDLTVEADRYTLGRALYHLTQRRGFLSNRLDTSADNKEDGVVKSGISQLSTEMEEAGCEYLGDYFYKLYDAQGNKVRIRQRYTDRNKHYQHEFDAICEKQELSSELIEDLQRAIFFQLPLKSQRHGVGRCTFERGKPRCADSHPDYEEFRMLCFVNNIQVKGPHDLELRPLTYEEREKIEPLFFRKSKPNFDFEDIAKALAGKKNYAWIHDKEERAYKFNYRMTQGVPGCPTIAQLKSIFGDDWKTGIAETYTLIQKKNGSKSLQEMVDDVWNVLYSFSSVEKLKEFAHHKLQLDEESAEKFAKIKLSHSFAALSLKAIRKFLPFLRKGMYYTHASFFANIPTIVGKEIWNKEQNRKYIMENVGELVFNYQPKHREVQGTIEMLIKDFLANNFELPAGATDKLYHPSMIETYPNAQRNEFGILQLGSPRTNAIRNPMAMRSLHILRRVVNQLLKESIIDENTEVHVEYARELNDANKRRAIADRQKEQDKQHKKYGDEIRKLYKEETGKDIEPTQTDVLKFQLWEEQNHHCLYTGEQIGITDFIGSNPKFDIEHTIPQSVGGDSTQMNLTLCDNRFNREVKKAKLPTELANHEEILTRIEPWKNKYEQLVKERDKQRTFAGMDKAVKDIRIQKRHKLQMEIDYWRGKYERFTMTEVPEGFSRRQGTGIGLISRYAGLYLKSLFHQADSRNKSNVYVVKGVATAEFRKMWGLQSEYEKKCRDNHSHHCMDAITIACIGKREYDLMAEYYRMEETFKQGRGSKPKFSKPWATFTEDVLNIYKNLLVVHDTPNNMPKHTKKYVQTSIGKVLAQGDTARGSLHLDTYYGAIERDGEIRYVVRRPLSSFTKPEELENIVDETVKRTIKEAIADKNFKQAIAEPIYMNEEKGILIKKVRCFAKSVKQPINIRQHRDLSKKEYKQQYHVMNENNYLLAIYEGLVKNKVVREFEIVSYIEAAKYYKRSQDRNIFSSIVPTHSTKYGLPLKTKLLMGQLVLMFEENPDEIQVDNTKDLVKRLYKVVGIEKDGRIKFKYHQEARKEGLPIFSTPYKNNDDYAPIFRQSINNINILVDGIDFTIDILGKVTLKE

SEQ ID NO: 379 - protein, 1088 aa, Bacillus smithii
MNYKMGLDIGIASVGWAVINLDLKRIEDLGVRIFDKAEHPQNGESLALPRRIARSARRRLRRRKHRLERIRRLLVSENVLTKEEMNLLFKQKKQIDVWQLRVDALERKLNNDELARVLLHLAKRRGFKSNRKSERNSKESSEFLKNIEENQSILAQYRSVGEMIVKDSKFAYHKRNKLDSYSNMIARDDLEREIKLIFEKQREFNNPVCTERLEEKYLNIWSSQRPFASKEDIEKKVGFCTFEPKEKRAPKATYTFQSFIVWEHINKLRLVSPDETRALTEIERNLLYKQAFSKNKMTYYDIRKLLNLSDDIHFKGLLYDPKSSLKQIENIRFLELDSYHKIRKCIENVYGKDGIRMFNETDIDTFGYALTIFKDDEDIVAYLQNEYITKNGKRVSNLANKVYDKSLIDELLNLSFSKFAHLSMKAIRNILPYMEQGEIYSKACELAGYNFTGPKKKEKALLLPVIPNIANPVVMRALTQSRKVVNAIIKKYGSPVSIHIELARDLSHSFDERKKIQKDQTENRKKNETAIKQLIEYELTKNPTGLDIVKFKLWSEQQGRCMYSLKPIELERLLEPGYVEVDHILPYSRSLDDSYANKVLVLTKENREKGNHTPVEYLGLGSERWKKFEKFVLANKQFSKKKKQNLLRLRYEETEEKEFKERNLNDTRYISKFFANFIKEHLKFADGDGGQKVYTINGKITAHLRSRWDFNKNREESDLHHAVDAVIVACATQGMIKKITEFYKAREQNKESAKKKEPIFPQPWPHFADELKARLSKFPQESIEAFALGNYDRKKLESLRPVFVSRMPKRSVTGAAHQETLRRCVGIDEQSGKIQTAVKTKLSDIKLDKDGHFPMYQKESDPRTYEAIRQRLLEHNNDPKKAFQEPLYKPKKNGEPGPVIRTVKIIDTKNKVVHLDGSKTVAYNSNIVRTDVFEKDGKYYCVPVYTMDIMKGTLPNKAIEANKPYSEWKEMTEEYTFQFSLFPNDLVRIVLPREKTIKTSTNEEIIIKDIFAYYKTIDSATGGLELISHDRNFSLRGVGSKTLKRFEKYQVDVLGNIHKVKGEKRVGLAAPTNQKKGKTVDSLQSVSD

SEQ ID NO: 380 - protein, 1035 aa, Puniceispirillum marinum
MRRLGLDLGTNSIGWCLLDLGDDGEPVSIFRTGARIFSDGRDPKSLGSLKATRREARLTRRRRDRFIQRQKNLINALVKYGLMPADEIQRQALAYKDPYPIRKKALDEAIDPYEMGRAIFHINQRRGFKSNRKSADNEAGVVKQSIADLEMKLGEAGARTIGEFLADRQATNDTVRARRLSGTNALYEFYPDRYMLEQEFDTLWAKQAAFNPSLYIEAARERLKEIVFFQRKLKPQEVGRCIFLSDEDRISKALPSFQRFRIYQELSNLAWIDHDGVAHRITASLALRDHLFDELEHKKKLTFKAMRAILRKQGVVDYPVGFNLESDNRDHLIGNLTSCIMRDAKKMIGSAWDRLDEEEQDSFILMLQDDQKGDDEVRSILTQQYGLSDDVAEDCLDVRLPDGHGSLSKKAIDRILPVLRDQGLIYYDAVKEAGLGEANLYDPYAALSDKLDYYGKALAGHVMGASGKFEDSDEKRYGTISNPTVHIALNQVRAVVNELIRLHGKPDEVVIEIGRDLPMGADGKRELERFQKEGRAKNERARDELKKLGHIDSRESRQKFQLWEQLAKEPVDRCCPFTGKMMSISDLFSDKVEIEHLLPFSLTLDDSMANKTVCFRQANRDKGNRAPFDAFGNSPAGYDWQEILGRSQNLPYAKRWRFLPDAMKRFEADGGFLERQLNDTRYISRYTTEYISTIIPKNKIWVVTGRLTSLLRGFWGLNSILRGHNTDDGTPAKKSRDDHRHHAIDAIVVGMTSRGLLQKVSKAARRSEDLDLTRLFEGRIDPWDGFRDEVKKHIDAIIVSHRPRKKSQGALHNDTAYGIVEHAENGASTVVHRVPITSLGKQSDIEKVRDPLIKSALLNETAGLSGKSFENAVQKWCADNSIKSLRIVETVSIIPITDKEGVAYKGYKGDGNAYMDIYQDPTSSKWKGEIVSRFDANQKGFIPSWQSQFPTARLIMRLRINDLLKLQDGEIEEIYRVQRLSGSKILMAPHTEANVDARDRDKNDTFKLTSKSPGKLQSASARKVHISPTGLIREG

SEQ ID NO: 381 - protein, 1153 aa, Barnesiella intestinihominis
MKNILGLDLGLSSIGWSVIRENSEEQELVAMGSRVVSLTAAELSSFTQGNGVSINSQRTQKRTQRKGYDRYQLRRTLLRNKLDTLGMLPDDSLSYLPKLQLWGLRAKAVTQRIELNELGRVLLHLNQKRGYKSIKSDFSGDKKITDYVKTVKTRYDELKEMRLTIGELFFRRLTENAFFRCKEQVYPRQAYVEEFDCIMNCQRKFYPDILTDETIRCIRDEIIYYQRPLKSCKYLVSRCEFEKRFYLNAAGKKTEAGPKVSPRTSPLFQVCRLWESINNIVVKDRRNEIVFISAEQRAALFDFLNTHEKLKGSDLLKLLGLSKTYGYRLGEQFKTGIQGNKTRVEIERALGNYPDKKRLLQFNLQEESSSMVNTETGEIIPMISLSFEQEPLYRLWHVLYSIDDREQLQSVLRQKFGIDDDEVLERLSAIDLVKAGFGNKSSKAIRRILPFLQLGMNYAEACEAAGYNHSNNYTKAENEARALLDRLPAIKKNELRQPVVEKILNQMVNVVNALMEKYGRFDEIRVELARELKQSKEERSNTYKSINKNQRENEQIAKRIVEYGVPTRSRIQKYKMWEESKHCCIYCGQPVDVGDFLRGFDVEVEHIIPKSLYFDDSFANKVCSCRSCNKEKNNRTAYDYMKSKGEKALSDYVERVNTMYTNNQISKTKWQNLLTPVDKISIDFIDRQLRESQYIARKAKEILTSICYNVTATSGSVTSFLRHVWGWDTVLHDLNFDRYKKVGLTEVIEVNHRGSVIRREQIKDWSKRFDHRHHAIDALTIACTKQAYIQRLNNLRAEEGPDFNKMSLERYIQSQPHFSVAQVREAVDRILVSFRAGKRAVTPGKRYIRKNRKRISVQSVLIPRGALSEESVYGVIHVWEKDEQGHVIQKQRAVMKYPITSINREMLDKEKVVDKRIHRILSGRLAQYNDNPKEAFAKPVYIDKECRIPIRTVRCFAKPAINTLVPLKKDDKGNPVAWVNPGNNHHVAIYRDEDGKYKERTVTFWEAVDRCRVGIPAIVTQPDTIWDNILQRNDISENVLESLPDVKWQFVLSLQQNEMFILGMNEEDYRYAMDQQDYALLNKYLYRVQKLSKSDYSFRYHTETSVEDKYDGKPNLKLSMQMGKLKRVSIKSLLGLNPHKVHISVLGEIKEIS

SEQ ID NO: 382 - protein, 1062 aa, Ralstonia syzygii
MAEKQHRWGLDIGTNSIGWAVIALIEGRPAGLVATGSRIFSDGRNPKDGSSLAVERRGPRQMRRRRDRYLRRRDRFMQALINVGLMPGDAAARKALVTENPYVLRQRGLDQALTLPEFGRALFHLNQRRGFQSNRKTDRATAKESGKVKNAIAAFRAGMGNARTVGEALARRLEDGRPVRARMVGQGKDEHYELYIAREWIAQEFDALWASQQRFHAEVLADAARDRLRAILLFQRKLLPVPVGKCFLEPNQPRVAAALPSAQRFRLMQELNHLRVMTLADKRERPLSFQERNDLLAQLVARPKCGFDMLRKIVFGANKEAYRFTIESERRKELKGCDTAAKLAKVNALGTRWQALSLDEQDRLVCLLLDGENDAVLADALREHYGLTDAQIDTLLGLSFEDGHMRLGRSALLRVLDALESGRDEQGLPLSYDKAVVAAGYPAHTADLENGERDALPYYGELLWRYTQDAPTAKNDAERKFGKIANPTVHIGLNQLRKLVNALIQRYGKPAQIVVELARNLKAGLEEKERIKKQQTANLERNERIRQKLQDAGVPDNRENRLRMRLFEELGQGNGLGTPCIYSGRQISLQRLFSNDVQVDHILPFSKTLDDSFANKVLAQHDANRYKGNRGPFEAFGANRDGYAWDDIRARAAVLPRNKRNRFAETAMQDWLHNETDFLARQLTDTAYLSRVARQYLTAICSKDDVYVSPGRLTAMLRAKWGLNRVLDGVMEEQGRPAVKNRDDHRHHAIDAVVIGATDRAMLQQVATLAARAREQDAERLIGDMPTPWPNFLEDVRAAVARCVVSHKPDHGPEGGLHNDTAYGIVAGPFEDGRYRVRHRVSLFDLKPGDLSNVRCDAPLQAELEPIFEQDDARAREVALTALAERYRQRKVWLEELMSVLPIRPRGEDGKTLPDSAPYKAYKGDSNYCYELFINERGRWDGELISTFRANQAAYRRFRNDPARFRRYTAGGRPLLMRLCINDYIAVGTAAERTIFRVVKMSENKITLAEHFEGGTLKQRDADKDDPFKYLTKSPGALRDLGARRIFVDLIGRVLDPGIKGD

SEQ ID NO: 383 - protein, 1059 aa, Wolinella succinogenes
MIERILGVDLGISSLGWAIVEYDKDDEAANRIIDCGVRLFTAAETPKKKESPNKARREARGIRRVLNRRRVRMNMIKKLFLRAGLIQDVDLDGEGGMFYSKANRADVWELRHDGLYRLLKGDELARVLIHIAKHRGYKFIGDDEADEESGKVKKAGVVLRQNFEAAGCRTVGEWLWRERGANGKKRNKHGDYEISIHRDLLVEEVEAIFVAQQEMRSTIATDALKAAYREIAFFVRPMQRIEKMVGHCTYFPEERRAPKSAPTAEKFIAISKFFSTVIIDNEGWEQKIIERKTLEELLDFAVSREKVEFRHLRKFLDLSDNEIFKGLHYKGKPKTAKKREATLFDPNEPTELEFDKVEAEKKAWISLRGAAKLREALGNEFYGRFVALGKHADEATKILTYYKDEGQKRRELTKLPLEAEMVERLVKIGFSDFLKLSLKAIRDILPAMESGARYDEAVLMLGVPHKEKSAILPPLNKTDIDILNPTVIRAFAQFRKVANALVRKYGAFDRVHFELAREINTKGEIEDIKESQRKNEKERKEAADWIAETSFQVPLTRKNILKKRLYIQQDGRCAYTGDVIELERLFDEGYCEIDHILPRSRSADDSFANKVLCLARANQQKTDRTPYEWFGHDAARWNAFETRTSAPSNRVRTGKGKIDRLLKKNFDENSEMAFKDRNLNDTRYMARAIKTYCEQYWVFKNSHTKAPVQVRSGKLTSVLRYQWGLESKDRESHTHHAVDAIIIAFSTQGMVQKLSEYYRFKETHREKERPKLAVPLANFRDAVEEATRIENTETVKEGVEVKRLLISRPPRARVTGQAHEQTAKPYPRIKQVKNKKKWRLAPIDEEKFESFKADRVASANQKNFYETSTIPRVDVYHKKGKFHLVPIYLHEMVLNELPNLSLGTNPEAMDENFFKFSIFKDDLISIQTQGTPKKPAKIIMGYFKNMHGANMVLSSINNSPCEGFTCTPVSMDKKHKDKCKLCPEENRIAGRCLQGFLDYWSQEGLRPPRKEFECDQGVKFALDVKKYQIDPLGYYYEVKQEKRLGTIPQMRSAKKLVKK

SEQ ID NO: 384 - protein, 1269 aa, Mycoplasma gallisepticum
MNNSIKSKPEVTIGLDLGVGSVGWAIVDNETNIIHHLGSRLFSQAKTAEDRRSFRGVRRLIRRRKYKLKRFVNLIWKYNSYFGFKNKEDILNNYQEQQKLHNTVLNLKSEALNAKIDPKALSWILHDYLKNRGHFYEDNRDFNVYPTKELAKYFDKYGYYKGIIDSKEDNDNKLEEELTKYKFSNKHWLEEVKKVLSNQTGLPEKFKEEYESLFSYVRNYSEGPGSINSVSPYGIYHLDEKEGKVVQKYNNIWDKTIGKCNIFPDEYRAPKNSPIAMIFNEINELSTIRSYSIYLTGWFINQEFKKAYLNKLLDLLIKTNGEKPIDARQFKKLREETIAESIGKETLKDVENEEKLEKEDHKWKLKGLKLNTNGKIQYNDLSSLAKFVHKLKQHLKLDFLLEDQYATLDKINFLQSLFVYLGKHLRYSNRVDSANLKEFSDSNKLFERILQKQKDGLFKLFEQTDKDDEKILAQTHSLSTKAMLLAITRMTNLDNDEDNQKNNDKGWNFEAIKNFDQKFIDITKKNNNLSLKQNKRYLDDRFINDAILSPGVKRILREATKVFNAILKQFSEEYDVTKVVIELARELSEEKELENTKNYKKLIKKNGDKISEGLKALGISEDEIKDILKSPTKSYKFLLWLQQDHIDPYSLKEIAFDDIFTKTEKFEIDHIIPYSISFDDSSSNKLLVLAESNQAKSNQTPYEFISSGNAGIKWEDYEAYCRKFKDGDSSLLDSTQRSKKFAKMMKTDTSSKYDIGFLARNLNDTRYATIVFRDALEDYANNHLVEDKPMFKVVCINGSVTSFLRKNFDDSSYAKKDRDKNIHHAVDASIISIFSNETKTLFNQLTQFADYKLFKNTDGSWKKIDPKTGVVTEVTDENWKQIRVRNQVSEIAKVIEKYIQDSNIERKARYSRKIENKTNISLFNDTVYSAKKVGYEDQIKRKNLKTLDIHESAKENKNSKVKRQFVYRKLVNVSLLNNDKLADLFAEKEDILMYRANPWVINLAEQIFNEYTENKKIKSQNVFEKYMLDLTKEFPEKFSEFLVKSMLRNKTAIIYDDKKNIVHRIKRLKMLSSELKENKLSNVIIRSKNQSGTKLSYQDTINSLALMIMRSIDPTAKKQYIRVPLNTLNLHLGDHDFDLHNMDAYLKKPKFVKYLKANEIGDEYKPWRVLTSGTLLIHKKDKKLMYISSFQNLNDVIEIKNLIETEYKENDDSDSKKKKKANRFLMTLSTILNDYILLDAKDNFDILGLSKNRIDEILNSKLGLDKIVK

SEQ ID NO: 385 - protein, 1138 aa, Acidothermus cellulolyticus
MGGSEVGTVPVTWRLGVDVGERSIGLAAVSYEEDKPKEILAAVSWIHDGGVGDERSGASRLALRGMARRARRLRRFRRARLRDLDMLLSELGWTPLPDKNVSPVDAWLARKRLAEEYVVDETERRRLLGYAVSHMARHRGWRNPWTTIKDLKNLPQPSDSWERTRESLEARYSVSLEPGTVGQWAGYLLQRAPGIRLNPTQQSAGRRAELSNATAFETRLRQEDVLWELRCIADVQGLPEDVVSNVIDAVFCQKRPSVPAERIGRDPLDPSQLRASRACLEFQEYRIVAAVANLRIRDGSGSRPLSLEERNAVIEALLAQTERSLTWSDIALEILKLPNESDLTSVPEEDGPSSLAYSQFAPFDETSARIAEFIAKNRRKIPTFAQWWQEQDRTSRSDLVAALADNSIAGEEEQELLVHLPDAELEALEGLALPSGRVAYSRLTLSGLTRVMRDDGVDVHNARKTCFGVDDNWRPPLPALHEATGHPVVDRNLAILRKFLSSATMRWGPPQSIVVELARGASESRERQAEEEAARRAHRKANDRIRAELRASGLSDPSPADLVRARLLELYDCHCMYCGAPISWENSELDHIVPRTDGGSNRHENLAITCGACNKEKGRRPFASWAETSNRVQLRDVIDRVQKLKYSGNMYWTRDEFSRYKKSVVARLKRRTSDPEVIQSIESTGYAAVALRDRLLSYGEKNGVAQVAVFRGGVTAEARRWLDISIERLFSRVAIFAQSTSTKRLDRRHHAVDAVVLTTLTPGVAKTLADARSRRVSAEFWRRPSDVNRHSTEEPQSPAYRQWKESCSGLGDLLISTAARDSIAVAAPLRLRPTGALHEETLRAFSEHTVGAAWKGAELRRIVEPEVYAAFLALTDPGGRFLKVSPSEDVLPADENRHIVLSDRVLGPRDRVKLFPDDRGSIRVRGGAAYIASFHHARVFRWGSSHSPSFALLRVSLADLAVAGLLRDGVDVFTAELPPWTPAWRYASIALVKAVESGDAKQVGWLVPGDELDFGPEGVTTAAGDLSMFLKYFPERHWVVTGFEDDKRINLKPAFLSAEQAEVLRTERSDRPDTLTEAGEILAQFFPRCWRATVAKVLCHPGLTVIRRTALGQPRWRRGHLPYSWRPWSADPWSGGTP

SEQ ID NO: 386 - protein, 1265 aa, Mycoplasma ovipneumoniae
MHNKKNITIGFDLGIASIGWAIIDSTTSKILDWGTRTFEERKTANERRAFRSTRRNIRRKAYRNQRFINLILKYKDLFELKNISDIQRANKKDTENYEKIISFFTEIYKKCAAKHSNILEVKVKALDSKIEKLDLIWILHDYLENRGFFYDLEEENVADKYEGIEHPSILLYDFFKKNGFFKSNSSIPKDLGGYSFSNLQWVNEIKKLFEVQEINPEFSEKFLNLFTSVRDYAKGPGSEHSASEYGIFQKDEKGKVFKKYDNIWDKTIGKCSFFVEENRSPVNYPSYEIFNLLNQLINLSTDLKTTNKKIWQLSSNDRNELLDELLKVKEKAKIISISLKKNEIKKIILKDFGFEKSDIDDQDTIEGRKIIKEEPTTKLEVTKHLLATIYSHSSDSNWININNILEFLPYLDAICIILDREKSRGQDEVLKKLTEKNIFEVLKIDREKQLDFVKSIFSNTKFNFKKIGNFSLKAIREFLPKMFEQNKNSEYLKWKDEEIRRKWEEQKSKLGKTDKKTKYLNPRIFQDEIISPGTKNTFEQAVLVLNQIIKKYSKENIIDAIIIESPREKNDKKTIEEIKKRNKKGKGKTLEKLFQILNLENKGYKLSDLETKPAKLLDRLRFYHQQDGIDLYTLDKINIDQLINGSQKYEIEHIIPYSMSYDNSQANKILTEKAENLKKGKLIASEYIKRNGDEFYNKYYEKAKELFINKYKKNKKLDSYVDLDEDSAKNRFRFLTLQDYDEFQVEFLARNLNDTRYSTKLFYHALVEHFENNEFFTYIDENSSKHKVKISTIKGHVTKYFRAKPVQKNNGPNENLNNNKPEKIEKNRENNEHHAVDAAIVAIIGNKNPQIANLLTLADNKTDKKFLLHDENYKENIETGELVKIPKFEVDKLAKVEDLKKIIQEKYEEAKKHTAIKFSRKTRTILNGGLSDETLYGFKYDEKEDKYFKIIKKKLVTSKNEELKKYFENPFGKKADGKSEYTVLMAQSHLSEFNKLKEIFEKYNGFSNKTGNAFVEYMNDLALKEPTLKAEIESAKSVEKLLYYNFKPSDQFTYHDNINNKSFKRFYKNIRIIEYKSIPIKFKILSKHDGGKSFKDTLFSLYSLVYKVYENGKESYKSIPVTSQMRNFGIDEFDFLDENLYNKEKLDIYKSDFAKPIPVNCKPVFVLKKGSILKKKSLDIDDFKETKETEEGNYYFISTISKRFNRDTAYGLKPLKLSVVKPVAEPSTNPIFKEYIPIHLDELGNEYPVKIKEHTDDEKLMCTIK

SEQ ID NO: 387 - RNA, 20 nt, Artificial Sequence
  Synthetic
aaggugaacguggaugaagu

SEQ ID NO: 388 - RNA, 20 nt, Artificial Sequence
  Synthetic
guaacggcagacuucuccuc

SEQ ID NO: 389 - RNA, 17 nt, Artificial Sequence
  Synthetic
gugaacguggaugaagu

SEQ ID NO: 390 - RNA, 17 nt, Artificial Sequence
  Synthetic
acggcagacuucuccuc

SEQ ID NO: 391 - RNA, 20 nt, Artificial Sequence
  Synthetic
gaaguugguggugaggcccu

SEQ ID NO: 392 - RNA, 20 nt, Artificial Sequence
  Synthetic
gcaaccucaaacagacacca

SEQ ID NO: 393 - RNA, 17 nt, Artificial Sequence
  Synthetic
gccccacagggcaguaa

SEQ ID NO: 394 - RNA, 17 nt, Artificial Sequence
  Synthetic
gccguuacugcccugug

SEQ ID NO: 395 - RNA, 17 nt, Artificial Sequence
  Synthetic
ggagaccaauagaaacu

SEQ ID NO: 396 - RNA, 17 nt, Artificial Sequence
  Synthetic
ggaugaaguugguggug

SEQ ID NO: 397 - RNA, 17 nt, Artificial Sequence
  Synthetic
ggugcaucugacuccug

SEQ ID NO: 398 - RNA, 20 nt, Artificial Sequence
  Synthetic
gucugccguuacugcccugu

SEQ ID NO: 399 - RNA, 20 nt, Artificial Sequence
  Synthetic
gugaacguggaugaaguugg

SEQ ID NO: 400 - RNA, 17 nt, Artificial Sequence
  Synthetic
guggggcaaggugaacg

SEQ ID NO: 401 - RNA, 17 nt, Artificial Sequence
  Synthetic
guggugaggcccugggc

SEQ ID NO: 402 - RNA, 17 nt, Artificial Sequence
  Synthetic
guuacaagacagguuua

SEQ ID NO: 403 - RNA, 17 nt, Artificial Sequence
  Synthetic
guucaccuugccccaca

SEQ ID NO: 404 - RNA, 17 nt, Artificial Sequence
  Synthetic
guugguggugaggcccu

SEQ ID NO: 405 - RNA, 17 nt, Artificial Sequence
  Synthetic
aacguggaugaaguugg

SEQ ID NO: 406 - RNA, 20 nt, Artificial Sequence
  Synthetic
aagguuacaagacagguuua

SEQ ID NO: 407 - RNA, 17 nt, Artificial Sequence
  Synthetic
acaugcccaguuucuau

SEQ ID NO: 408 - RNA, 17 nt, Artificial Sequence
  Synthetic
accauggugucuguuug

SEQ ID NO: 409 - RNA, 17 nt, Artificial Sequence
  Synthetic
accucaaacagacacca

SEQ ID NO: 410 - RNA, 20 nt, Artificial Sequence
  Synthetic
accuugauaccaaccugccc

SEQ ID NO: 411 - RNA, 17 nt, Artificial Sequence
  Synthetic
aggagaccaauagaaac

SEQ ID NO: 412 - RNA, 17 nt, Artificial Sequence
  Synthetic
aggagucagaugcacca

SEQ ID NO: 413 - RNA, 20 nt, Artificial Sequence
  Synthetic
agucugccguuacugcccug

SEQ ID NO: 414 - RNA, 17 nt, Artificial Sequence
  Synthetic
aguugguggugaggccc

SEQ ID NO: 415 - RNA, 20 nt, Artificial Sequence
  Synthetic
cacguucaccuugccccaca

SEQ ID NO: 416 - RNA, 20 nt, Artificial Sequence
  Synthetic
cauggugcaucugacuccug

SEQ ID NO: 417 - RNA, 20 nt, Artificial Sequence
  Synthetic
ccacguucaccuugccccac

SEQ ID NO: 418 - RNA, 20 nt, Artificial Sequence
  Synthetic
cccugggcagguugguauca

SEQ ID NO: 419 - RNA, 20 nt, Artificial Sequence
  Synthetic
ccuguggggcaaggugaacg

SEQ ID NO: 420 - RNA, 20 nt, Artificial Sequence
  Synthetic
ccuugauaccaaccugccca

SEQ ID NO: 421 - RNA, 20 nt, Artificial Sequence
  Synthetic
cguggaugaaguugguggug

SEQ ID NO: 422 - RNA, 20 nt, Artificial Sequence
  Synthetic
cguuacugcccuguggggca

SEQ ID NO: 423 - RNA, 17 nt, Artificial Sequence
  Synthetic
cguucaccuugccccac

SEQ ID NO: 424 - RNA, 20 nt, Artificial Sequence
  Synthetic
cucaggagucagaugcacca

SEQ ID NO: 425 - RNA, 17 nt, Artificial Sequence
  Synthetic
cugccguuacugcccug

SEQ ID NO: 426 - RNA, 20 nt, Artificial Sequence
  Synthetic
cuugccccacagggcaguaa

SEQ ID NO: 427 - RNA, 20 nt, Artificial Sequence
  Synthetic
uaaggagaccaauagaaacu

SEQ ID NO: 428 - RNA, 17 nt, Artificial Sequence
  Synthetic
uacugcccuguggggca

SEQ ID NO: 429 - RNA, 17 nt, Artificial Sequence
  Synthetic
uaucaagguuacaagac

SEQ ID NO: 430 - RNA, 20 nt, Artificial Sequence
  Synthetic
ucugccguuacugcccugug

SEQ ID NO: 431 - RNA, 20 nt, Artificial Sequence
  Synthetic
ugaaguugguggugaggccc

SEQ ID NO: 432 - RNA, 17 nt, Artificial Sequence
  Synthetic
ugaggcccugggcaggu

SEQ ID NO: 433 - RNA, 17 nt, Artificial Sequence
  Synthetic
ugauaccaaccugccca

SEQ ID NO: 434 - RNA, 20 nt, Artificial Sequence
  Synthetic
ugcaccauggugucuguuug

SEQ ID NO: 435 - RNA, 17 nt, Artificial Sequence
  Synthetic
ugccguuacugcccugu

SEQ ID NO: 436 - RNA, 17 nt, Artificial Sequence
  Synthetic
ugggcagguugguauca

SEQ ID NO: 437 - RNA, 20 nt, Artificial Sequence
  Synthetic
ugguaucaagguuacaagac

SEQ ID NO: 438 - RNA, 20 nt, Artificial Sequence
  Synthetic
uggugaggcccugggcaggu

SEQ ID NO: 439 - RNA, 20 nt, Artificial Sequence
  Synthetic
uuaaggagaccaauagaaac

SEQ ID NO: 440 - RNA, 17 nt, Artificial Sequence
  Synthetic
uugauaccaaccugccc

SEQ ID NO: 441 - RNA, 20 nt, Artificial Sequence
  Synthetic
uugguggugaggcccugggc

SEQ ID NO: 442 - RNA, 20 nt, Artificial Sequence
  Synthetic
caccauggugcaucugacuc

SEQ ID NO: 443 - RNA, 20 nt, Artificial Sequence
  Synthetic
ccauggugcaucugacuccu

SEQ ID NO: 444 - RNA, 20 nt, Artificial Sequence
  Synthetic
cauggugcaucugacuccug

SEQ ID NO: 445 - RNA, 20 nt, Artificial Sequence
  Synthetic
uggugcaucugacuccugag

SEQ ID NO: 446 - RNA, 20 nt, Artificial Sequence
  Synthetic
aagucugccguuacugcccu

SEQ ID NO: 447 - RNA, 20 nt, Artificial Sequence
  Synthetic
agucugccguuacugcccug

SEQ ID NO: 448 - RNA, 20 nt, Artificial Sequence
  Synthetic
uuacugcccuguggggcaag

SEQ ID NO: 449 - RNA, 20 nt, Artificial Sequence
  Synthetic
cccuguggggcaaggugaac

SEQ ID NO: 450 - RNA, 20 nt, Artificial Sequence
  Synthetic
guggggcaaggugaacgugg

SEQ ID NO: 451 - RNA, 20 nt, Artificial Sequence
  Synthetic
gaacguggaugaaguuggug

SEQ ID NO: 452 - RNA, 20 nt, Artificial Sequence
  Synthetic
augaaguugguggugaggcc

SEQ ID NO: 453 - RNA, 20 nt, Artificial Sequence
  Synthetic
caagguuacaagacagguuu

SEQ ID NO: 454 - RNA, 20 nt, Artificial Sequence
  Synthetic
aagguuacaagacagguuua

SEQ ID NO: 455 - RNA, 20 nt, Artificial Sequence
  Synthetic
gacagguuuaaggagaccaa

SEQ ID NO: 456 - RNA, 20 nt, Artificial Sequence
  Synthetic
uuuaaggagaccaauagaaa

SEQ ID NO: 457 - RNA, 17 nt, Artificial Sequence
  Synthetic
cauggugcaucugacuc

SEQ ID NO: 458 - RNA, 17 nt, Artificial Sequence
  Synthetic
uggugcaucugacuccu

SEQ ID NO: 459 - RNA, 17 nt, Artificial Sequence
  Synthetic
ggugcaucugacuccug

SEQ ID NO: 460 - RNA, 17 nt, Artificial Sequence
  Synthetic
ugcaucugacuccugag

SEQ ID NO: 461 - RNA, 17 nt, Artificial Sequence
  Synthetic
ucugccguuacugcccu

SEQ ID NO: 462 - RNA, 17 nt, Artificial Sequence
  Synthetic
cugccguuacugcccug

SEQ ID NO: 463 - RNA, 17 nt, Artificial Sequence
  Synthetic
cugcccuguggggcaag

SEQ ID NO: 464 - RNA, 17 nt, Artificial Sequence
  Synthetic
uguggggcaaggugaac

SEQ ID NO: 465 - RNA, 17 nt, Artificial Sequence
  Synthetic
gggcaaggugaacgugg

SEQ ID NO: 466 - RNA, 17 nt, Artificial Sequence
  Synthetic
cguggaugaaguuggug

SEQ ID NO: 467 - RNA, 17 nt, Artificial Sequence
  Synthetic
aaguugguggugaggcc

SEQ ID NO: 468 - RNA, 17 nt, Artificial Sequence
  Synthetic
gguuacaagacagguuu

SEQ ID NO: 469 - RNA, 17 nt, Artificial Sequence
  Synthetic
guuacaagacagguuua

SEQ ID NO: 470 - RNA, 17 nt, Artificial Sequence
  Synthetic
agguuuaaggagaccaa

SEQ ID NO: 471 - RNA, 17 nt, Artificial Sequence
  Synthetic
aaggagaccaauagaaa

SEQ ID NO: 472 - RNA, 20 nt, Artificial Sequence
  Synthetic
gcuagugaacacaguugugu

SEQ ID NO: 473 - RNA, 20 nt, Artificial Sequence
  Synthetic
gugucuguuugagguugcua

SEQ ID NO: 474 - RNA, 20 nt, Artificial Sequence
  Synthetic
agaugcaccauggugucugu

SEQ ID NO: 475 - RNA, 20 nt, Artificial Sequence
  Synthetic
guaacggcagacuucuccuc

SEQ ID NO: 476 - RNA, 20 nt, Artificial Sequence
  Synthetic
aguaacggcagacuucuccu

SEQ ID NO: 477 - RNA, 20 nt, Artificial Sequence
  Synthetic
uccacguucaccuugcccca

SEQ ID NO: 478 - RNA, 20 nt, Artificial Sequence
  Synthetic
aaccuugauaccaaccugcc

SEQ ID NO: 479 - RNA, 17 nt, Artificial Sequence
  Synthetic
agugaacacaguugugu

SEQ ID NO: 480 - RNA, 17 nt, Artificial Sequence
  Synthetic
ucuguuugagguugcua

SEQ ID NO: 481 - RNA, 17 nt, Artificial Sequence
  Synthetic
ugcaccauggugucugu

SEQ ID NO: 482 - RNA, 17 nt, Artificial Sequence
  Synthetic
acggcagacuucuccuc

SEQ ID NO: 483 - RNA, 17 nt, Artificial Sequence
  Synthetic
aacggcagacuucuccu

SEQ ID NO: 484 - RNA, 17 nt, Artificial Sequence
  Synthetic
acguucaccuugcccca

SEQ ID NO: 485 - RNA, 17 nt, Artificial Sequence
  Synthetic
cuugauaccaaccugcc

SEQ ID NO: 486-499 - skipped (14 entries)

SEQ ID NO: 500 - RNA, 20 nt, Artificial Sequence
  Synthetic
guaacggcagacuucuccuc

SEQ ID NO: 501 - RNA, 20 nt, Artificial Sequence
  Synthetic
aaggugaacguggaugaagu

SEQ ID NO: 502-6802 - skipped (6301 entries)

SEQ ID NO: 6803 - RNA, 17 nt, Artificial Sequence
  Synthetic
ggugcaccugacuccug

SEQ ID NO: 6804 - RNA, 20 nt, Artificial Sequence
  Synthetic
guaacggcagacuucuccac

SEQ ID NO: 6805 - RNA, 17 nt, Artificial Sequence
  Synthetic
acggcagacuucuccac

SEQ ID NO: 6806 - RNA, 17 nt, Artificial Sequence
  Synthetic
acuucuccacaggaguc

SEQ ID NO: 6807 - RNA, 17 nt, Artificial Sequence
  Synthetic
aggagucaggugcacca

SEQ ID NO: 6808 - RNA, 20 nt, Artificial Sequence
  Synthetic
cauggugcaccugacuccug

SEQ ID NO: 6809 - RNA, 20 nt, Artificial Sequence
  Synthetic
cacaggagucaggugcacca

SEQ ID NO: 6810 - RNA, 20 nt, Artificial Sequence
  Synthetic
cagacuucuccacaggaguc

SEQ ID NO: 6811 - RNA, 20 nt, Artificial Sequence
  Synthetic
gaaguugguggugaggcccu

SEQ ID NO: 6812 - RNA, 20 nt, Artificial Sequence
  Synthetic
gcaaccucaaacagacacca

SEQ ID NO: 6813 - RNA, 17 nt, Artificial Sequence
  Synthetic
gccccacagggcaguaa

SEQ ID NO: 6814 - RNA, 17 nt, Artificial Sequence
  Synthetic
gccguuacugcccugug

SEQ ID NO: 6815 - RNA, 17 nt, Artificial Sequence
  Synthetic
ggaugaaguugguggug

SEQ ID NO: 6816 - RNA, 20 nt, Artificial Sequence
  Synthetic
gucugccguuacugcccugu

SEQ ID NO: 6817 - RNA, 17 nt, Artificial Sequence
  Synthetic
gugaacguggaugaagu

SEQ ID NO: 6818 - RNA, 20 nt, Artificial Sequence
  Synthetic
gugaacguggaugaaguugg

SEQ ID NO: 6819 - RNA, 17 nt, Artificial Sequence
  Synthetic
guggggcaaggugaacg

SEQ ID NO: 6820 - RNA, 17 nt, Artificial Sequence
  Synthetic
guggugaggcccugggc

SEQ ID NO: 6821 - RNA, 17 nt, Artificial Sequence
  Synthetic
guucaccuugccccaca

SEQ ID NO: 6822 - RNA, 17 nt, Artificial Sequence
  Synthetic
guugguggugaggcccu

SEQ ID NO: 6823 - RNA, 17 nt, Artificial Sequence
  Synthetic
aacguggaugaaguugg

SEQ ID NO: 6824 - RNA, 20 nt, Artificial Sequence
  Synthetic
aagcaaauguaagcaauaga

SEQ ID NO: 6825 - RNA, 20 nt, Artificial Sequence
  Synthetic
aaggugaacguggaugaagu

SEQ ID NO: 6826 - RNA, 17 nt, Artificial Sequence
  Synthetic
accauggugucuguuug

SEQ ID NO: 6827 - RNA, 17 nt, Artificial Sequence
  Synthetic
accucaaacagacacca

SEQ ID NO: 6828 - RNA, 20 nt, Artificial Sequence
  Synthetic
accuugauaccaaccugccc

SEQ ID NO: 6829 - RNA, 20 nt, Artificial Sequence
  Synthetic
agucugccguuacugcccug

SEQ ID NO: 6830 - RNA, 17 nt, Artificial Sequence
  Synthetic
aguugguggugaggccc

SEQ ID NO: 6831 - RNA, 17 nt, Artificial Sequence
  Synthetic
caaauguaagcaauaga

SEQ ID NO: 6832 - RNA, 20 nt, Artificial Sequence
  Synthetic
cacguucaccuugccccaca

SEQ ID NO: 6833 - RNA, 20 nt, Artificial Sequence
  Synthetic
ccacguucaccuugccccac

SEQ ID NO: 6834 - RNA, 20 nt, Artificial Sequence
  Synthetic
cccugggcagguugguauca

SEQ ID NO: 6835 - RNA, 20 nt, Artificial Sequence
  Synthetic
ccuguggggcaaggugaacg

SEQ ID NO: 6836 - RNA, 20 nt, Artificial Sequence
  Synthetic
ccuugauaccaaccugccca

SEQ ID NO: 6837 - RNA, 20 nt, Artificial Sequence
  Synthetic
cguggaugaaguugguggug

SEQ ID NO: 6838 - RNA, 20 nt, Artificial Sequence
  Synthetic
cguuacugcccuguggggca

SEQ ID NO: 6839 - RNA, 17 nt, Artificial Sequence
  Synthetic
cguucaccuugccccac

SEQ ID NO: 6840 - RNA, 17 nt, Artificial Sequence
  Synthetic
cugccguuacugcccug

SEQ ID NO: 6841 - RNA, 20 nt, Artificial Sequence
  Synthetic
cuugccccacagggcaguaa

SEQ ID NO: 6842 - RNA, 17 nt, Artificial Sequence
  Synthetic
uacugcccuguggggca

SEQ ID NO: 6843 - RNA, 17 nt, Artificial Sequence
  Synthetic
uaucaagguuacaagac

SEQ ID NO: 6844 - RNA, 20 nt, Artificial Sequence
  Synthetic
ucugccguuacugcccugug

SEQ ID NO: 6845 - RNA, 20 nt, Artificial Sequence
  Synthetic
ugaaguugguggugaggccc

SEQ ID NO: 6846 - RNA, 17 nt, Artificial Sequence
  Synthetic
ugaggcccugggcaggu

SEQ ID NO: 6847 - RNA, 17 nt, Artificial Sequence
  Synthetic
ugauaccaaccugccca

SEQ ID NO: 6848 - RNA, 20 nt, Artificial Sequence
  Synthetic
ugcaccauggugucuguuug

SEQ ID NO: 6849 - RNA, 17 nt, Artificial Sequence
  Synthetic
ugccguuacugcccugu

SEQ ID NO: 6850 - RNA, 17 nt, Artificial Sequence
  Synthetic
ugggcagguugguauca

SEQ ID NO: 6851 - RNA, 20 nt, Artificial Sequence
  Synthetic
ugguaucaagguuacaagac

SEQ ID NO: 6852 - RNA, 20 nt, Artificial Sequence
  Synthetic
uggugaggcccugggcaggu

SEQ ID NO: 6853 - RNA, 17 nt, Artificial Sequence
  Synthetic
uugauaccaaccugccc

SEQ ID NO: 6854 - RNA, 20 nt, Artificial Sequence
  Synthetic
uugguggugaggcccugggc

SEQ ID NO: 6855 - RNA, 20 nt, Artificial Sequence
  Synthetic
guaacggcagacuucuccac

SEQ ID NO: 6856 - RNA, 20 nt, Artificial Sequence
  Synthetic
cccuguggggcaagguggac

SEQ ID NO: 6857 - RNA, 20 nt, Artificial Sequence
  Synthetic
agucugccguuacugcccug

SEQ ID NO: 6858 - RNA, 20 nt, Artificial Sequence
  Synthetic
aagucugccguuacugcccu

SEQ ID NO: 6859 - RNA, 20 nt, Artificial Sequence
  Synthetic
aaccuugauaccaaccugcc

SEQ ID NO: 6860 - RNA, 20 nt, Artificial Sequence
  Synthetic
uccacguucaccuugcccca

SEQ ID NO: 6861 - RNA, 20 nt, Artificial Sequence
  Synthetic
gcuagugaacacaguugugu

SEQ ID NO: 6862 - RNA, 20 nt, Artificial Sequence
  Synthetic
ccauggugcaccugacuccu

SEQ ID NO: 6863 - RNA, 20 nt, Artificial Sequence
  Synthetic
cauggugcaccugacuccug

SEQ ID NO: 6864 - RNA, 20 nt, Artificial Sequence
  Synthetic
aggugcaccauggugucugu

SEQ ID NO: 6865 - RNA, 20 nt, Artificial Sequence
  Synthetic
uggugcaccugacuccugug

SEQ ID NO: 6866 - RNA, 20 nt, Artificial Sequence
  Synthetic
gaacguggaugaaguuggug

SEQ ID NO: 6867 - RNA, 20 nt, Artificial Sequence
  Synthetic
uuacugcccuguggggcaag

SEQ ID NO: 6868 - RNA, 20 nt, Artificial Sequence
  Synthetic
gugucuguuugagguugcua

SEQ ID NO: 6869 - RNA, 20 nt, Artificial Sequence
  Synthetic
guggggcaaggugaacgugg

SEQ ID NO: 6870 - RNA, 20 nt, Artificial Sequence
  Synthetic
augaaguugguggugaggcc

SEQ ID NO: 6871 - RNA, 20 nt, Artificial Sequence
  Synthetic
aguaacggcagacuucucca

SEQ ID NO: 6872-16009 - skipped (9138 entries)

SEQ ID NO: 16010 - RNA, 17 nt, Artificial Sequence
  Synthetic
guucaccuugccccaca

SEQ ID NO: 16011 - RNA, 17 nt, Artificial Sequence
  Synthetic
aggagucaggugcacca

SEQ ID NO: 16012 - RNA, 17 nt, Artificial Sequence
  Synthetic
uacugcccuguggggca

SEQ ID NO: 16013 - RNA, 17 nt, Artificial Sequence
  Synthetic
gcugggcauaaaaguca

SEQ ID NO: 16014 - RNA, 17 nt, Artificial Sequence
  Synthetic
guuacaagacagguuua

SEQ ID NO: 16015 - RNA, 17 nt, Artificial Sequence
  Synthetic
aggagaccaauagaaac

SEQ ID NO: 16016 - RNA, 17 nt, Artificial Sequence
  Synthetic
cguucaccuugccccac

SEQ ID NO: 16017 - RNA, 17 nt, Artificial Sequence
  Synthetic
acggcagacuucuccac

SEQ ID NO: 16018 - RNA, 17 nt, Artificial Sequence
  Synthetic
uaucaagguuacaagac

SEQ ID NO: 16019 - RNA, 17 nt, Artificial Sequence
  Synthetic
acuuuuaugcccagccc

SEQ ID NO: 16020 - RNA, 17 nt, Artificial Sequence
  Synthetic
ggcugggcauaaaaguc

SEQ ID NO: 16021 - RNA, 17 nt, Artificial Sequence
  Synthetic
acuucuccacaggaguc

SEQ ID NO: 16022 - RNA, 17 nt, Artificial Sequence
  Synthetic
aauagaaacugggcaug

SEQ ID NO: 16023 - RNA, 17 nt, Artificial Sequence
  Synthetic
cugccguuacugcccug

SEQ ID NO: 16024 - RNA, 17 nt, Artificial Sequence
  Synthetic
ggaugaaguugguggug

SEQ ID NO: 16025 - RNA, 17 nt, Artificial Sequence
  Synthetic
gccguuacugcccugug

SEQ ID NO: 16026 - RNA, 17 nt, Artificial Sequence
  Synthetic
acaugcccaguuucuau

SEQ ID NO: 16027 - RNA, 17 nt, Artificial Sequence
  Synthetic
ggagaccaauagaaacu

SEQ ID NO: 16028 - RNA, 17 nt, Artificial Sequence
  Synthetic
gugaacguggaugaagu

SEQ ID NO: 16029 - RNA, 17 nt, Artificial Sequence
  Synthetic
ugccguuacugcccugu

SEQ ID NO: 16030 - RNA, 20 nt, Artificial Sequence
  Synthetic
cuugccccacagggcaguaa

SEQ ID NO: 16031 - RNA, 20 nt, Artificial Sequence
  Synthetic
cacguucaccuugccccaca

SEQ ID NO: 16032 - RNA, 20 nt, Artificial Sequence
  Synthetic
cacaggagucaggugcacca

SEQ ID NO: 16033 - RNA, 20 nt, Artificial Sequence
  Synthetic
agcagggagggcaggagcca

SEQ ID NO: 16034 - RNA, 20 nt, Artificial Sequence
  Synthetic
cguuacugcccuguggggca

SEQ ID NO: 16035 - RNA, 20 nt, Artificial Sequence
  Synthetic
agggcugggcauaaaaguca

SEQ ID NO: 16036 - RNA, 20 nt, Artificial Sequence
  Synthetic
aagcaaauguaagcaauaga

SEQ ID NO: 16037 - RNA, 20 nt, Artificial Sequence
  Synthetic
aagguuacaagacagguuua

SEQ ID NO: 16038 - RNA, 20 nt, Artificial Sequence
  Synthetic
uuaaggagaccaauagaaac

SEQ ID NO: 16039 - RNA, 20 nt, Artificial Sequence
  Synthetic
guaacggcagacuucuccac

SEQ ID NO: 16040 - RNA, 20 nt, Artificial Sequence
  Synthetic
ugguaucaagguuacaagac

SEQ ID NO: 16041 - RNA, 20 nt, Artificial Sequence
  Synthetic
cugacuuuuaugcccagccc

SEQ ID NO: 16042 - RNA, 20 nt, Artificial Sequence
  Synthetic
ugaaguugguggugaggccc

SEQ ID NO: 16043 - RNA, 20 nt, Artificial Sequence
  Synthetic
gagcagggagggcaggagcc

SEQ ID NO: 16044 - RNA, 20 nt, Artificial Sequence
  Synthetic
cagggcugggcauaaaaguc

SEQ ID NO: 16045 - RNA, 20 nt, Artificial Sequence
  Synthetic
cagacuucuccacaggaguc

SEQ ID NO: 16046 - RNA, 20 nt, Artificial Sequence
  Synthetic
gugaacguggaugaaguugg

SEQ ID NO: 16047 - RNA, 20 nt, Artificial Sequence
  Synthetic
accaauagaaacugggcaug

SEQ ID NO: 16048 - RNA, 20 nt, Artificial Sequence
  Synthetic
agucugccguuacugcccug

SEQ ID NO: 16049 - RNA, 20 nt, Artificial Sequence
  Synthetic
cguggaugaaguugguggug

SEQ ID NO: 16050 - RNA, 20 nt, Artificial Sequence
  Synthetic
ucugccguuacugcccugug

SEQ ID NO: 16051 - RNA, 20 nt, Artificial Sequence
  Synthetic
uaaggagaccaauagaaacu

SEQ ID NO: 16052 - RNA, 20 nt, Artificial Sequence
  Synthetic
gaaguugguggugaggcccu

SEQ ID NO: 16053 - RNA, 20 nt, Artificial Sequence
  Synthetic
ggagggcaggagccagggcu

SEQ ID NO: 16054 - RNA, 20 nt, Artificial Sequence
  Synthetic
aaggugaacguggaugaagu

SEQ ID NO: 16055 - RNA, 20 nt, Artificial Sequence
  Synthetic
gucugccguuacugcccugu

SEQ ID NO: 16056 - RNA, 17 nt, Artificial Sequence
  Synthetic
gccccacagggcaguaa

SEQ ID NO: 16057 - RNA, 17 nt, Artificial Sequence
  Synthetic
guggugaggcccugggc

SEQ ID NO: 16058 - RNA, 17 nt, Artificial Sequence
  Synthetic
guggggcaaggugaacg

SEQ ID NO: 16059 - RNA, 17 nt, Artificial Sequence
  Synthetic
ggugcaccugacuccug

SEQ ID NO: 16060 - RNA, 17 nt, Artificial Sequence
  Synthetic
guugguggugaggcccu

SEQ ID NO: 16061 - RNA, 17 nt, Artificial Sequence
  Synthetic
gggcaggagccagggcu

SEQ ID NO: 16062 - RNA, 20 nt, Artificial Sequence
  Synthetic
gcaaccucaaacagacacca

SEQ ID NO: 16063 - RNA, 20 nt, Artificial Sequence
  Synthetic
gggagggcaggagccagggc

SEQ ID NO: 16064 - RNA, 17 nt, Artificial Sequence
  Synthetic
accucaaacagacacca

SEQ ID NO: 16065 - RNA, 17 nt, Artificial Sequence
  Synthetic
ugauaccaaccugccca

SEQ ID NO: 16066 - RNA, 17 nt, Artificial Sequence
  Synthetic
agggagggcaggagcca

SEQ ID NO: 16067 - RNA, 17 nt, Artificial Sequence
  Synthetic
ugggcagguugguauca

SEQ ID NO: 16068 - RNA, 17 nt, Artificial Sequence
  Synthetic
caaauguaagcaauaga

SEQ ID NO: 16069 - RNA, 17 nt, Artificial Sequence
  Synthetic
aguugguggugaggccc

SEQ ID NO: 16070 - RNA, 17 nt, Artificial Sequence
  Synthetic
uugauaccaaccugccc

SEQ ID NO: 16071 - RNA, 17 nt, Artificial Sequence
  Synthetic
cagggagggcaggagcc

SEQ ID NO: 16072 - RNA, 17 nt, Artificial Sequence
  Synthetic
agggcaggagccagggc

SEQ ID NO: 16073 - RNA, 17 nt, Artificial Sequence
  Synthetic
aacguggaugaaguugg

SEQ ID NO: 16074 - RNA, 17 nt, Artificial Sequence
  Synthetic
accauggugucuguuug

SEQ ID NO: 16075 - RNA, 17 nt, Artificial Sequence
  Synthetic
ugaggcccugggcaggu

SEQ ID NO: 16076 - RNA, 20 nt, Artificial Sequence
  Synthetic
ccuugauaccaaccugccca

SEQ ID NO: 16077 - RNA, 20 nt, Artificial Sequence
  Synthetic
cccugggcagguugguauca

SEQ ID NO: 16078 - RNA, 20 nt, Artificial Sequence
  Synthetic
ccacguucaccuugccccac

SEQ ID NO: 16079 - RNA, 20 nt, Artificial Sequence
  Synthetic
accuugauaccaaccugccc

SEQ ID NO: 16080 - RNA, 20 nt, Artificial Sequence
  Synthetic
uugguggugaggcccugggc

SEQ ID NO: 16081 - RNA, 20 nt, Artificial Sequence
  Synthetic
ccuguggggcaaggugaacg

SEQ ID NO: 16082 - RNA, 20 nt, Artificial Sequence
  Synthetic
cauggugcaccugacuccug

SEQ ID NO: 16083 - RNA, 20 nt, Artificial Sequence
  Synthetic
ugcaccauggugucuguuug

SEQ ID NO: 16084 - RNA, 20 nt, Artificial Sequence
  Synthetic
uggugaggcccugggcaggu

SEQ ID NO: 16085 - RNA, 18 nt, Artificial Sequence
  Synthetic
aacggcagacuucuccac

SEQ ID NO: 16086 - RNA, 19 nt, Artificial Sequence
  Synthetic
uaacggcagacuucuccac

SEQ ID NO: 16087 - RNA, 20 nt, Artificial Sequence
  Synthetic
guaacggcagacuucuccac

SEQ ID NO: 16088 - RNA, 21 nt, Artificial Sequence
  Synthetic
aguaacggcagacuucuccac

SEQ ID NO: 16089 - RNA, 22 nt, Artificial Sequence
  Synthetic
caguaacggcagacuucuccac

SEQ ID NO: 16090 - RNA, 23 nt, Artificial Sequence
  Synthetic
gcaguaacggcagacuucuccac

SEQ ID NO: 16091 - RNA, 24 nt, Artificial Sequence
  Synthetic
ggcaguaacggcagacuucuccac

SEQ ID NO: 16092 - RNA, 18 nt, Artificial Sequence
  Synthetic
cuguggggcaaggugaac

SEQ ID NO: 16093 - RNA, 19 nt, Artificial Sequence
  Synthetic
ccuguggggcaaggugaac

SEQ ID NO: 16094 - RNA, 20 nt, Artificial Sequence
  Synthetic
cccuguggggcaaggugaac

SEQ ID NO: 16095 - RNA, 21 nt, Artificial Sequence
  Synthetic
gcccuguggggcaaggugaac

SEQ ID NO: 16096 - RNA, 22 nt, Artificial Sequence
  Synthetic
ugcccuguggggcaaggugaac

SEQ ID NO: 16097 - RNA, 23 nt, Artificial Sequence
  Synthetic
cugcccuguggggcaaggugaac

SEQ ID NO: 16098 - RNA, 24 nt, Artificial Sequence
  Synthetic
acugcccuguggggcaaggugaac

SEQ ID NO: 16099 - RNA, 18 nt, Artificial Sequence
  Synthetic
cacguucaccuugcccca

SEQ ID NO: 16100 - RNA, 19 nt, Artificial Sequence
  Synthetic
ccacguucaccuugcccca

SEQ ID NO: 16101 - RNA, 20 nt, Artificial Sequence
  Synthetic
uccacguucaccuugcccca

SEQ ID NO: 16102 - RNA, 21 nt, Artificial Sequence
  Synthetic
auccacguucaccuugcccca

SEQ ID NO: 16103 - RNA, 22 nt, Artificial Sequence
  Synthetic
cauccacguucaccuugcccca

SEQ ID NO: 16104 - RNA, 23 nt, Artificial Sequence
  Synthetic
ucauccacguucaccuugcccca

SEQ ID NO: 16105 - RNA, 24 nt, Artificial Sequence
  Synthetic
uucauccacguucaccuugcccca

SEQ ID NO: 16106 - RNA, 18 nt, Artificial Sequence
  Synthetic
uaacggcagacuucucca

SEQ ID NO: 16107 - RNA, 19 nt, Artificial Sequence
  Synthetic
guaacggcagacuucucca

SEQ ID NO: 16108 - RNA, 20 nt, Artificial Sequence
  Synthetic
aguaacggcagacuucucca

SEQ ID NO: 16109 - RNA, 21 nt, Artificial Sequence
  Synthetic
caguaacggcagacuucucca

SEQ ID NO: 16110 - RNA, 22 nt, Artificial Sequence
  Synthetic
gcaguaacggcagacuucucca

SEQ ID NO: 16111 - RNA, 23 nt, Artificial Sequence
  Synthetic
ggcaguaacggcagacuucucca

SEQ ID NO: 16112 - RNA, 24 nt, Artificial Sequence
  Synthetic
gggcaguaacggcagacuucucca

SEQ ID NO: 16113 - RNA, 18 nt, Artificial Sequence
  Synthetic
gucuguuugagguugcua

SEQ ID NO: 16114 - RNA, 19 nt, Artificial Sequence
  Synthetic
ugucuguuugagguugcua

SEQ ID NO: 16115 - RNA, 20 nt, Artificial Sequence
  Synthetic
gugucuguuugagguugcua

SEQ ID NO: 16116 - RNA, 21 nt, Artificial Sequence
  Synthetic
ggugucuguuugagguugcua

SEQ ID NO: 16117 - RNA, 22 nt, Artificial Sequence
  Synthetic
uggugucuguuugagguugcua

SEQ ID NO: 16118 - RNA, 23 nt, Artificial Sequence
  Synthetic
auggugucuguuugagguugcua

SEQ ID NO: 16119 - RNA, 24 nt, Artificial Sequence
  Synthetic
cauggugucuguuugagguugcua

SEQ ID NO: 16120 - RNA, 18 nt, Artificial Sequence
  Synthetic
ccuugauaccaaccugcc

SEQ ID NO: 16121 - RNA, 19 nt, Artificial Sequence
  Synthetic
accuugauaccaaccugcc

SEQ ID NO: 16122 - RNA, 20 nt, Artificial Sequence
  Synthetic
aaccuugauaccaaccugcc

SEQ ID NO: 16123 - RNA, 21 nt, Artificial Sequence
  Synthetic
uaaccuugauaccaaccugcc

SEQ ID NO: 16124 - RNA, 22 nt, Artificial Sequence
  Synthetic
guaaccuugauaccaaccugcc

SEQ ID NO: 16125 - RNA, 23 nt, Artificial Sequence
  Synthetic
uguaaccuugauaccaaccugcc

SEQ ID NO: 16126 - RNA, 24 nt, Artificial Sequence
  Synthetic
uuguaaccuugauaccaaccugcc

SEQ ID NO: 16127 - RNA, 18 nt, Artificial Sequence
  Synthetic
gugcaccauggugucugu

SEQ ID NO: 16128 - RNA, 19 nt, Artificial Sequence
  Synthetic
ggugcaccauggugucugu

SEQ ID NO: 16129 - RNA, 20 nt, Artificial Sequence
  Synthetic
aggugcaccauggugucugu

SEQ ID NO: 16130 - RNA, 21 nt, Artificial Sequence
  Synthetic
caggugcaccauggugucugu

SEQ ID NO: 16131 - RNA, 22 nt, Artificial Sequence
  Synthetic
ucaggugcaccauggugucugu

SEQ ID NO: 16132 - RNA, 23 nt, Artificial Sequence
  Synthetic
gucaggugcaccauggugucugu

SEQ ID NO: 16133 - RNA, 24 nt, Artificial Sequence
  Synthetic
agucaggugcaccauggugucugu

SEQ ID NO: 16134 - RNA, 18 nt, Artificial Sequence
  Synthetic
uagugaacacaguugugu

SEQ ID NO: 16135 - RNA, 19 nt, Artificial Sequence
  Synthetic
cuagugaacacaguugugu

SEQ ID NO: 16136 - RNA, 20 nt, Artificial Sequence
  Synthetic
gcuagugaacacaguugugu

SEQ ID NO: 16137 - RNA, 21 nt, Artificial Sequence
  Synthetic
ugcuagugaacacaguugugu

SEQ ID NO: 16138 - RNA, 22 nt, Artificial Sequence
  Synthetic
uugcuagugaacacaguugugu

SEQ ID NO: 16139 - RNA, 23 nt, Artificial Sequence
  Synthetic
guugcuagugaacacaguugugu

SEQ ID NO: 16140 - RNA, 24 nt, Artificial Sequence
  Synthetic
gguugcuagugaacacaguugugu

SEQ ID NO: 16141 - RNA, 18 nt, Artificial Sequence
  Synthetic
uaaggagaccaauagaaa

SEQ ID NO: 16142 - RNA, 19 nt, Artificial Sequence
  Synthetic
uuaaggagaccaauagaaa

SEQ ID NO: 16143 - RNA, 20 nt, Artificial Sequence
  Synthetic
uuuaaggagaccaauagaaa

SEQ ID NO: 16144 - RNA, 21 nt, Artificial Sequence
  Synthetic
guuuaaggagaccaauagaaa

SEQ ID NO: 16145 - RNA, 22 nt, Artificial Sequence
  Synthetic
gguuuaaggagaccaauagaaa

SEQ ID NO: 16146 - RNA, 23 nt, Artificial Sequence
  Synthetic
agguuuaaggagaccaauagaaa

SEQ ID NO: 16147 - RNA, 24 nt, Artificial Sequence
  Synthetic
cagguuuaaggagaccaauagaaa

SEQ ID NO: 16148 - RNA, 18 nt, Artificial Sequence
  Synthetic
cagguuuaaggagaccaa

SEQ ID NO: 16149 - RNA, 19 nt, Artificial Sequence
  Synthetic
acagguuuaaggagaccaa

SEQ ID NO: 16150 - RNA, 20 nt, Artificial Sequence
  Synthetic
gacagguuuaaggagaccaa

SEQ ID NO: 16151 - RNA, 21 nt, Artificial Sequence
  Synthetic
agacagguuuaaggagaccaa

SEQ ID NO: 16152 - RNA, 22 nt, Artificial Sequence
  Synthetic
aagacagguuuaaggagaccaa

SEQ ID NO: 16153 - RNA, 23 nt, Artificial Sequence
  Synthetic
caagacagguuuaaggagaccaa

SEQ ID NO: 16154 - RNA, 24 nt, Artificial Sequence
  Synthetic
acaagacagguuuaaggagaccaa

SEQ ID NO: 16155 - RNA, 18 nt, Artificial Sequence
  Synthetic
gguuacaagacagguuua

SEQ ID NO: 16156 - RNA, 19 nt, Artificial Sequence
  Synthetic
agguuacaagacagguuua

SEQ ID NO: 16157 - RNA, 20 nt, Artificial Sequence
  Synthetic
aagguuacaagacagguuua

SEQ ID NO: 16158 - RNA, 21 nt, Artificial Sequence
  Synthetic
caagguuacaagacagguuua

SEQ ID NO: 16159 - RNA, 22 nt, Artificial Sequence
  Synthetic
ucaagguuacaagacagguuua

SEQ ID NO: 16160 - RNA, 23 nt, Artificial Sequence
  Synthetic
aucaagguuacaagacagguuua

SEQ ID NO: 16161 - RNA, 24 nt, Artificial Sequence
  Synthetic
uaucaagguuacaagacagguuua

SEQ ID NO: 16162 - RNA, 18 nt, Artificial Sequence
  Synthetic
gaaguugguggugaggcc

SEQ ID NO: 16163 - RNA, 19 nt, Artificial Sequence
  Synthetic
ugaaguugguggugaggcc

SEQ ID NO: 16164 - RNA, 20 nt, Artificial Sequence
  Synthetic
augaaguugguggugaggcc

SEQ ID NO: 16165 - RNA, 21 nt, Artificial Sequence
  Synthetic
gaugaaguugguggugaggcc

SEQ ID NO: 16166 - RNA, 22 nt, Artificial Sequence
  Synthetic
ggaugaaguugguggugaggcc

SEQ ID NO: 16167 - RNA, 23 nt, Artificial Sequence
  Synthetic
uggaugaaguugguggugaggcc

SEQ ID NO: 16168 - RNA, 24 nt, Artificial Sequence
  Synthetic
guggaugaaguugguggugaggcc

SEQ ID NO: 16169 - RNA, 18 nt, Artificial Sequence
  Synthetic
acugcccuguggggcaag

SEQ ID NO: 16170 - RNA, 19 nt, Artificial Sequence
  Synthetic
uacugcccuguggggcaag

SEQ ID NO: 16171 - RNA, 20 nt, Artificial Sequence
  Synthetic
uuacugcccuguggggcaag

SEQ ID NO: 16172 - RNA, 21 nt, Artificial Sequence
  Synthetic
guuacugcccuguggggcaag

SEQ ID NO: 16173 - RNA, 22 nt, Artificial Sequence
  Synthetic
cguuacugcccuguggggcaag

SEQ ID NO: 16174 - RNA, 23 nt, Artificial Sequence
  Synthetic
ccguuacugcccuguggggcaag

SEQ ID NO: 16175 - RNA, 24 nt, Artificial Sequence
  Synthetic
gccguuacugcccuguggggcaag

SEQ ID NO: 16176 - RNA, 18 nt, Artificial Sequence
  Synthetic
ggagggcaggagccaggg

SEQ ID NO: 16177 - RNA, 19 nt, Artificial Sequence
  Synthetic
gggagggcaggagccaggg

SEQ ID NO: 16178 - RNA, 20 nt, Artificial Sequence
  Synthetic
agggagggcaggagccaggg

SEQ ID NO: 16179 - RNA, 21 nt, Artificial Sequence
  Synthetic
cagggagggcaggagccaggg

SEQ ID NO: 16180 - RNA, 22 nt, Artificial Sequence
  Synthetic
gcagggagggcaggagccaggg

SEQ ID NO: 16181 - RNA, 23 nt, Artificial Sequence
  Synthetic
agcagggagggcaggagccaggg

SEQ ID NO: 16182 - RNA, 24 nt, Artificial Sequence
  Synthetic
gagcagggagggcaggagccaggg

SEQ ID NO: 16183 - RNA, 18 nt, Artificial Sequence
  Synthetic
ugggcauaaaagucaggg

SEQ ID NO: 16184 - RNA, 19 nt, Artificial Sequence
  Synthetic
cugggcauaaaagucaggg

SEQ ID NO: 16185 - RNA, 20 nt, Artificial Sequence
  Synthetic
gcugggcauaaaagucaggg

SEQ ID NO: 16186 - RNA, 21 nt, Artificial Sequence
  Synthetic
ggcugggcauaaaagucaggg

SEQ ID NO: 16187 - RNA, 22 nt, Artificial Sequence
  Synthetic
gggcugggcauaaaagucaggg

SEQ ID NO: 16188 - RNA, 23 nt, Artificial Sequence
  Synthetic
agggcugggcauaaaagucaggg

SEQ ID NO: 16189 - RNA, 24 nt, Artificial Sequence
  Synthetic
cagggcugggcauaaaagucaggg

SEQ ID NO: 16190 - RNA, 18 nt, Artificial Sequence
  Synthetic
ggggcaaggugaacgugg

SEQ ID NO: 16191 - RNA, 19 nt, Artificial Sequence
  Synthetic
uggggcaaggugaacgugg

SEQ ID NO: 16192 - RNA, 20 nt, Artificial Sequence
  Synthetic
guggggcaaggugaacgugg

SEQ ID NO: 16193 - RNA, 21 nt, Artificial Sequence
  Synthetic
uguggggcaaggugaacgugg

SEQ ID NO: 16194 - RNA, 22 nt, Artificial Sequence
  Synthetic
cuguggggcaaggugaacgugg

SEQ ID NO: 16195 - RNA, 23 nt, Artificial Sequence
  Synthetic
ccuguggggcaaggugaacgugg

SEQ ID NO: 16196 - RNA, 24 nt, Artificial Sequence
  Synthetic
cccuguggggcaaggugaacgugg

SEQ ID NO: 16197 - RNA, 18 nt, Artificial Sequence
  Synthetic
ucugccguuacugcccug

SEQ ID NO: 16198 - RNA, 19 nt, Artificial Sequence
  Synthetic
gucugccguuacugcccug

SEQ ID NO: 16199 - RNA, 20 nt, Artificial Sequence
  Synthetic
agucugccguuacugcccug

SEQ ID NO: 16200 - RNA, 21 nt, Artificial Sequence
  Synthetic
aagucugccguuacugcccug

SEQ ID NO: 16201 - RNA, 22 nt, Artificial Sequence
  Synthetic
gaagucugccguuacugcccug

SEQ ID NO: 16202 - RNA, 23 nt, Artificial Sequence
  Synthetic
agaagucugccguuacugcccug

SEQ ID NO: 16203 - RNA, 24 nt, Artificial Sequence
  Synthetic
gagaagucugccguuacugcccug

SEQ ID NO: 16204 - RNA, 18 nt, Artificial Sequence
  Synthetic
uggugcaccugacuccug

SEQ ID NO: 16205 - RNA, 19 nt, Artificial Sequence
  Synthetic
auggugcaccugacuccug

SEQ ID NO: 16206 - RNA, 20 nt, Artificial Sequence
  Synthetic
cauggugcaccugacuccug

SEQ ID NO: 16207 - RNA, 21 nt, Artificial Sequence
  Synthetic
ccauggugcaccugacuccug

SEQ ID NO: 16208 - RNA, 22 nt, Artificial Sequence
  Synthetic
accauggugcaccugacuccug

SEQ ID NO: 16209 - RNA, 23 nt, Artificial Sequence
  Synthetic
caccauggugcaccugacuccug

SEQ ID NO: 16210 - RNA, 24 nt, Artificial Sequence
  Synthetic
acaccauggugcaccugacuccug

SEQ ID NO: 16211 - RNA, 18 nt, Artificial Sequence
  Synthetic
acguggaugaaguuggug

SEQ ID NO: 16212 - RNA, 19 nt, Artificial Sequence
  Synthetic
aacguggaugaaguuggug

SEQ ID NO: 16213 - RNA, 20 nt, Artificial Sequence
  Synthetic
gaacguggaugaaguuggug

SEQ ID NO: 16214 - RNA, 21 nt, Artificial Sequence
  Synthetic
ugaacguggaugaaguuggug

SEQ ID NO: 16215 - RNA, 22 nt, Artificial Sequence
  Synthetic
gugaacguggaugaaguuggug

SEQ ID NO: 16216 - RNA, 23 nt, Artificial Sequence
  Synthetic
ggugaacguggaugaaguuggug

SEQ ID NO: 16217 - RNA, 24 nt, Artificial Sequence
  Synthetic
aggugaacguggaugaaguuggug

SEQ ID NO: 16218 - RNA, 18 nt, Artificial Sequence
  Synthetic
gugcaccugacuccugug

SEQ ID NO: 16219 - RNA, 19 nt, Artificial Sequence
  Synthetic
ggugcaccugacuccugug

SEQ ID NO: 16220 - RNA, 20 nt, Artificial Sequence
  Synthetic
uggugcaccugacuccugug

SEQ ID NO: 16221 - RNA, 21 nt, Artificial Sequence
  Synthetic
auggugcaccugacuccugug

SEQ ID NO: 16222 - RNA, 22 nt, Artificial Sequence
  Synthetic
cauggugcaccugacuccugug

SEQ ID NO: 16223 - RNA, 23 nt, Artificial Sequence
  Synthetic
ccauggugcaccugacuccugug

SEQ ID NO: 16224 - RNA, 24 nt, Artificial Sequence
  Synthetic
accauggugcaccugacuccugug

SEQ ID NO: 16225 - RNA, 18 nt, Artificial Sequence
  Synthetic
gucugccguuacugcccu

SEQ ID NO: 16226 - RNA, 19 nt, Artificial Sequence
  Synthetic
agucugccguuacugcccu

SEQ ID NO: 16227 - RNA, 20 nt, Artificial Sequence
  Synthetic
aagucugccguuacugcccu

SEQ ID NO: 16228 - RNA, 21 nt, Artificial Sequence
  Synthetic
gaagucugccguuacugcccu

SEQ ID NO: 16229 - RNA, 22 nt, Artificial Sequence
  Synthetic
agaagucugccguuacugcccu

SEQ ID NO: 16230 - RNA, 23 nt, Artificial Sequence
  Synthetic
gagaagucugccguuacugcccu

SEQ ID NO: 16231 - RNA, 24 nt, Artificial Sequence
  Synthetic
ggagaagucugccguuacugcccu

SEQ ID NO: 16232 - RNA, 18 nt, Artificial Sequence
  Synthetic
auggugcaccugacuccu

SEQ ID NO: 16233 - RNA, 19 nt, Artificial Sequence
  Synthetic
cauggugcaccugacuccu

SEQ ID NO: 16234 - RNA, 20 nt, Artificial Sequence
  Synthetic
ccauggugcaccugacuccu

SEQ ID NO: 16235 - RNA, 21 nt, Artificial Sequence
  Synthetic
accauggugcaccugacuccu

SEQ ID NO: 16236 - RNA, 22 nt, Artificial Sequence
  Synthetic
caccauggugcaccugacuccu

SEQ ID NO: 16237 - RNA, 23 nt, Artificial Sequence
  Synthetic
acaccauggugcaccugacuccu

SEQ ID NO: 16238 - RNA, 24 nt, Artificial Sequence
  Synthetic
gacaccauggugcaccugacuccu

SEQ ID NO: 16239 - RNA, 18 nt, Artificial Sequence
  Synthetic
agggcugggcauaaaagu

SEQ ID NO: 16240 - RNA, 19 nt, Artificial Sequence
  Synthetic
cagggcugggcauaaaagu

SEQ ID NO: 16241 - RNA, 20 nt, Artificial Sequence
  Synthetic
ccagggcugggcauaaaagu

SEQ ID NO: 16242 - RNA, 21 nt, Artificial Sequence
  Synthetic
gccagggcugggcauaaaagu

SEQ ID NO: 16243 - RNA, 22 nt, Artificial Sequence
  Synthetic
agccagggcugggcauaaaagu

SEQ ID NO: 16244 - RNA, 23 nt, Artificial Sequence
  Synthetic
gagccagggcugggcauaaaagu

SEQ ID NO: 16245 - RNA, 24 nt, Artificial Sequence
  Synthetic
ggagccagggcugggcauaaaagu

SEQ ID NO: 16246 - RNA, 18 nt, Artificial Sequence
  Synthetic
agguuacaagacagguuu

SEQ ID NO: 16247 - RNA, 19 nt, Artificial Sequence
  Synthetic
aagguuacaagacagguuu

SEQ ID NO: 16248 - RNA, 20 nt, Artificial Sequence
  Synthetic
caagguuacaagacagguuu

SEQ ID NO: 16249 - RNA, 21 nt, Artificial Sequence
  Synthetic
ucaagguuacaagacagguuu

SEQ ID NO: 16250 - RNA, 22 nt, Artificial Sequence
  Synthetic
aucaagguuacaagacagguuu

SEQ ID NO: 16251 - RNA, 23 nt, Artificial Sequence
  Synthetic
uaucaagguuacaagacagguuu

SEQ ID NO: 16252 - RNA, 24 nt, Artificial Sequence
  Synthetic
guaucaagguuacaagacagguuu

SEQ ID NO: 16253 - RNA, 17 nt, Artificial Sequence
  Synthetic
agccaucuauugcuuac

SEQ ID NO: 16254 - RNA, 17 nt, Artificial Sequence
  Synthetic
gucagggcagagccauc

SEQ ID NO: 16255 - RNA, 20 nt, Artificial Sequence
  Synthetic
cagagccaucuauugcuuac

SEQ ID NO: 16256 - RNA, 20 nt, Artificial Sequence
  Synthetic
aaagucagggcagagccauc

SEQ ID NO: 16257 - DNA, 1072 bp, Artificial Sequence
  Synthetic
ataggaacttgaatcaaggaaatgattttaaaacgcagtattcttagtggactagaggaaaaaaataatctgagccaagtagaagaccttttcccctcctacccctactttctaagtcacagaggctttttgttcccccagacactcttgcagattagtccaggcagaaacagttagatgtccccagttaacctcctatttgacaccactgattaccccattgatagtcacactttgggttgtaagtgactttttatttatttgtatttttgactgcattaagaggtctctagttttttatctcttgtttcccaaaacctaataagtaactaatgcacagagcacattgatttgtatttattctatttttagacataatttattagcatgcatgagcaaattaagaaaaacaacaacaaatgaatgcatatatatgtatatgtatgtgtgtatatatacacacatatatatatatattttttcttttcttaccagaaggttttaatccaaataaggagaagatatgcttagaaccgaggtagagttttcatccattctgtcctgtaagtattttgcatattctggagacgcaggaagagatccatctacatatcccaaagctgaattatggtagacaaaactcttccacttttagtgcatcaacttcttatttgtgtaataagaaaattgggaaaacgatcttcaatatgcttaccaagctgtgattccaaatattacgtaaatacacttgcaaaggaggatgtttttagtagcaatttgtactgatggtatggggccaagagatatatcttagagggagggctgagggtttgaagtccaactcctaagccagtgccagaagagccaaggacaggtacggctgtcatcacttagacctcaccctgtggagccacaccctagggttggccaatctactcccaggagcagggagggcaggagccagggctgggcataaaagtcagggcagagccatctattgcttacatttgcttctgacacaactgtgttcactagcaacctcaaacagacaccatggtgcatctgactcctg

SEQ ID NO: 16258 - DNA, 1128 bp, Artificial Sequence
  Synthetic
ggagaagtctgccgttactgccctgtggggcaaggtgaacgtggatgaagttggtggtgaggccctgggcaggttggtatcaaggttacaagacaggtttaaggagaccaatagaaactgggcatgtggagacagagaagactcttgggtttctgataggcactgactctctctgcctattggtctattttcccacccttaggctgctggtggtctacccttggacccagaggttctttgagtcctttggggatctgtccactcctgatgctgttatgggcaaccctaaggtgaaggctcatggcaagaaagtgctcggtgcctttagtgatggcctggctcacctggacaacctcaagggcacctttgccacactgagtgagctgcactgtgacaagctgcacgtggatcctgagaacttcagggtgagtctatgggacgcttgatgttttctttccccttcttttctatggttaagttcatgtcataggaaggggataagtaacagggtacagtttagaatgggaaacagacgaatgattgcatcagtgtggaagtctcaggatcgttttagtttcttttatttgctgttcataacaattgttttcttttgtttaattcttgctttctttttttttcttctccgcaatttttactattatacttaatgccttaacattgtgtataacaaaaggaaatatctctgagatacattaagtaacttaaaaaaaaactttacacagtctgcctagtacattactatttggaatatatgtgtgcttatttgcatattcataatctccctactttattttcttttatttttaattgatacataatcattatacatatttatgggttaaagtgtaatgttttaatatgtgtacacatattgaccaaatcagggtaattttgcatttgtaattttaaaaaatgctttcttcttttaatatacttttttgtttatcttatttctaatactttccctaatctctttctttcagggcaataatgatacaatgtatcatgcctctttgcaccattctaaagaataacagtgataatttctgggttaaggcaatagcaatatctctgcatataaatatttctgcatataaattgtaactg

SEQ ID NO: 16259 - DNA, 2201 bp, Artificial Sequence
  Synthetic
ataggaacttgaatcaaggaaatgattttaaaacgcagtattcttagtggactagaggaaaaaaataatctgagccaagtagaagaccttttcccctcctacccctactttctaagtcacagaggctttttgttcccccagacactcttgcagattagtccaggcagaaacagttagatgtccccagttaacctcctatttgacaccactgattaccccattgatagtcacactttgggttgtaagtgactttttatttatttgtatttttgactgcattaagaggtctctagttttttatctcttgtttcccaaaacctaataagtaactaatgcacagagcacattgatttgtatttattctatttttagacataatttattagcatgcatgagcaaattaagaaaaacaacaacaaatgaatgcatatatatgtatatgtatgtgtgtatatatacacacatatatatatatattttttcttttcttaccagaaggttttaatccaaataaggagaagatatgcttagaaccgaggtagagttttcatccattctgtcctgtaagtattttgcatattctggagacgcaggaagagatccatctacatatcccaaagctgaattatggtagacaaaactcttccacttttagtgcatcaacttcttatttgtgtaataagaaaattgggaaaacgatcttcaatatgcttaccaagctgtgattccaaatattacgtaaatacacttgcaaaggaggatgtttttagtagcaatttgtactgatggtatggggccaagagatatatcttagagggagggctgagggtttgaagtccaactcctaagccagtgccagaagagccaaggacaggtacggctgtcatcacttagacctcaccctgtggagccacaccctagggttggccaatctactcccaggagcagggagggcaggagccagggctgggcataaaagtcagggcagagccatctattgcttacatttgcttctgacacaactgtgttcactagcaacctcaaacagacaccatggtgcatctgactcctgaggagaagtctgccgttactgccctgtggggcaaggtgaacgtggatgaagttggtggtgaggccctgggcaggttggtatcaaggttacaagacaggtttaaggagaccaatagaaactgggcatgtggagacagagaagactcttgggtttctgataggcactgactctctctgcctattggtctattttcccacccttaggctgctggtggtctacccttggacccagaggttctttgagtcctttggggatctgtccactcctgatgctgttatgggcaaccctaaggtgaaggctcatggcaagaaagtgctcggtgcctttagtgatggcctggctcacctggacaacctcaagggcacctttgccacactgagtgagctgcactgtgacaagctgcacgtggatcctgagaacttcagggtgagtctatgggacgcttgatgttttctttccccttcttttctatggttaagttcatgtcataggaaggggataagtaacagggtacagtttagaatgggaaacagacgaatgattgcatcagtgtggaagtctcaggatcgttttagtttcttttatttgctgttcataacaattgttttcttttgtttaattcttgctttctttttttttcttctccgcaatttttactattatacttaatgccttaacattgtgtataacaaaaggaaatatctctgagatacattaagtaacttaaaaaaaaactttacacagtctgcctagtacattactatttggaatatatgtgtgcttatttgcatattcataatctccctactttattttcttttatttttaattgatacataatcattatacatatttatgggttaaagtgtaatgttttaatatgtgtacacatattgaccaaatcagggtaattttgcatttgtaattttaaaaaatgctttcttcttttaatatacttttttgtttatcttatttctaatactttccctaatctctttctttcagggcaataatgatacaatgtatcatgcctctttgcaccattctaaagaataacagtgataatttctgggttaaggcaatagcaatatctctgcatataaatatttctgcatataaattgtaactg

SEQ ID NO: 16260 - DNA, 103 bp, Artificial Sequence
  Synthetic
actgtgttcactagcaacctcaaacagacaccatggtgcatctgactcctggggagaagtctgccgttactgccctgtggggcaaggtgaacgtggatgaagt

SEQ ID NO: 16261-16296 - skipped (36 entries)

SEQ ID NO: 16297 - DNA, 59 bp, Artificial Sequence
  Synthetic
ctcctgaggagaagtctgccgttactgccctgtggggcaagggtgaacgtggatgaagt

SEQ ID NO: 16298 - DNA, 58 bp, Artificial Sequence
  Synthetic
ctcctgaggagaagtctgccgttactgccctgtggggcaagatgaacgtggatgaagt

SEQ ID NO: 16299 - DNA, 20 bp, Artificial Sequence
  Synthetic
gtaacggcagacttctccac

SEQ ID NO: 16300 - DNA, 3159 bp, Artificial Sequence
  Synthetic
atgaagcggaactacatcctgggcctggacatcggcatcaccagcgtgggctacggcatcatcgactacgagacacgggacgtgatcgatgccggcgtgcggctgttcaaagaggccaacgtggaaaacaacgagggcaggcggagcaagagaggcgccagaaggctgaagcggcggaggcggcatagaatccagagagtgaagaagctgctgttcgactacaacctgctgaccgaccacagcgagctgagcggcatcaacccctacgaggccagagtgaagggcctgagccagaagctgagcgaggaagagttctctgccgccctgctgcacctggccaagagaagaggcgtgcacaacgtgaacgaggtggaagaggacaccggcaacgagctgtccaccaaagagcagatcagccggaacagcaaggccctggaagagaaatacgtggccgaactgcagctggaacggctgaagaaagacggcgaagtgcggggcagcatcaacagattcaagaccagcgactacgtgaaagaagccaaacagctgctgaaggtgcagaaggcctaccaccagctggaccagagcttcatcgacacctacatcgacctgctggaaacccggcggacctactatgagggacctggcgagggcagccccttcggctggaaggacatcaaagaatggtacgagatgctgatgggccactgcacctacttccccgaggaactgcggagcgtgaagtacgcctacaacgccgacctgtacaacgccctgaacgacctgaacaatctcgtgatcaccagggacgagaacgagaagctggaatattacgagaagttccagatcatcgagaacgtgttcaagcagaagaagaagcccaccctgaagcagatcgccaaagaaatcctcgtgaacgaagaggatattaagggctacagagtgaccagcaccggcaagcccgagttcaccaacctgaaggtgtaccacgacatcaaggacattaccgcccggaaagagattattgagaacgccgagctgctggatcagattgccaagatcctgaccatctaccagagcagcgaggacatccaggaagaactgaccaatctgaactccgagctgacccaggaagagatcgagcagatctctaatctgaagggctataccggcacccacaacctgagcctgaaggccatcaacctgatcctggacgagctgtggcacaccaacgacaaccagatcgctatcttcaaccggctgaagctggtgcccaagaaggtggacctgtcccagcagaaagagatccccaccaccctggtggacgacttcatcctgagccccgtcgtgaagagaagcttcatccagagcatcaaagtgatcaacgccatcatcaagaagtacggcctgcccaacgacatcattatcgagctggcccgcgagaagaactccaaggacgcccagaaaatgatcaacgagatgcagaagcggaaccggcagaccaacgagcggatcgaggaaatcatccggaccaccggcaaagagaacgccaagtacctgatcgagaagatcaagctgcacgacatgcaggaaggcaagtgcctgtacagcctggaagccatccctctggaagatctgctgaacaaccccttcaactatgaggtggaccacatcatccccagaagcgtgtccttcgacaacagcttcaacaacaaggtgctcgtgaagcaggaagaaaacagcaagaagggcaaccggaccccattccagtacctgagcagcagcgacagcaagatcagctacgaaaccttcaagaagcacatcctgaatctggccaagggcaagggcagaatcagcaagaccaagaaagagtatctgctggaagaacgggacatcaacaggttctccgtgcagaaagacttcatcaaccggaacctggtggataccagatacgccaccagaggcctgatgaacctgctgcggagctacttcagagtgaacaacctggacgtgaaagtgaagtccatcaatggcggcttcaccagctttctgcggcggaagtggaagtttaagaaagagcggaacaaggggtacaagcaccacgccgaggacgccctgatcattgccaacgccgatttcatcttcaaagagtggaagaaactggacaaggccaaaaaagtgatggaaaaccagatgttcgaggaaaagcaggccgagagcatgcccgagatcgaaaccgagcaggagtacaaagagatcttcatcaccccccaccagatcaagcacattaaggacttcaaggactacaagtacagccaccgggtggacaagaagcctaatagagagctgattaacgacaccctgtactccacccggaaggacgacaagggcaacaccctgatcgtgaacaatctgaacggcctgtacgacaaggacaatgacaagctgaaaaagctgatcaacaagagccccgaaaagctgctgatgtaccaccacgacccccagacctaccagaaactgaagctgattatggaacagtacggcgacgagaagaatcccctgtacaagtactacgaggaaaccgggaactacctgaccaagtactccaaaaaggacaacggccccgtgatcaagaagattaagtattacggcaacaaactgaacgcccatctggacatcaccgacgactaccccaacagcagaaacaaggtcgtgaagctgtccctgaagccctacagattcgacgtgtacctggacaatggcgtgtacaagttcgtgaccgtgaagaatctggatgtgatcaaaaaagaaaactactacgaagtgaatagcaagtgctatgaggaagctaagaagctgaagaagatcagcaaccaggccgagtttatcgcctccttctacaacaacgatctgatcaagatcaacggcgagctgtatagagtgatcggcgtgaacaacgacctgctgaaccggatcgaagtgaacatgatcgacatcacctaccgcgagtacctggaaaacatgaacgacaagaggccccccaggatcattaagacaatcgcctccaagacccagagcattaagaagtacagcacagacattctgggcaacctgtatgaagtgaaatctaagaagcaccctcagatcatcaaaaagggc

SEQ ID NO: 16301 - DNA, 3159 bp, Artificial Sequence
  Synthetic
atgaagcgcaactacatcctcggactggacatcggcattacctccgtgggatacggcatcatcgattacgaaactagggatgtgatcgacgctggagtcaggctgttcaaagaggcgaacgtggagaacaacgaggggcggcgctcaaagaggggggcccgccggctgaagcgccgccgcagacatagaatccagcgcgtgaagaagctgctgttcgactacaaccttctgaccgaccactccgaactttccggcatcaacccatatgaggctagagtgaagggattgtcccaaaagctgtccgaggaagagttctccgccgcgttgctccacctcgccaagcgcaggggagtgcacaatgtgaacgaagtggaagaagataccggaaacgagctgtccaccaaggagcagatcagccggaactccaaggccctggaagagaaatacgtggcggaactgcaactggagcggctgaagaaagacggagaagtgcgcggctcgatcaaccgcttcaagacctcggactacgtgaaggaggccaagcagctcctgaaagtgcaaaaggcctatcaccaacttgaccagtcctttatcgatacctacatcgatctgctcgagactcggcggacttactacgagggtccaggggagggctccccatttggttggaaggatattaaggagtggtacgaaatgctgatgggacactgcacatacttccctgaggagctgcggagcgtgaaatacgcatacaacgcagacctgtacaacgcgctgaacgacctgaacaatctcgtgatcacccgggacgagaacgaaaagctcgagtattacgaaaagttccagattattgagaacgtgttcaaacagaagaagaagccgacactgaagcagattgccaaggaaatcctcgtgaacgaagaggacatcaagggctatcgagtgacctcaacgggaaagccggagttcaccaatctgaaggtctaccacgacatcaaagacattaccgcccggaaggagatcattgagaacgcggagctgttggaccagattgcgaagattctgaccatctaccaatcctccgaggatattcaggaagaactcaccaacctcaacagcgaactgacccaggaggagatagagcaaatctccaacctgaagggctacaccggaactcataacctgagcctgaaggccatcaacttgatcctggacgagctgtggcacaccaacgataaccagatcgctattttcaatcggctgaagctggtccccaagaaagtggacctctcacaacaaaaggagatccctactacccttgtggacgatttcattctgtcccccgtggtcaagagaagcttcatacagtcaatcaaagtgatcaatgccattatcaagaaatacggtctgcccaacgacattatcattgagctcgcccgcgagaagaactcgaaggacgcccagaagatgattaacgaaatgcagaagaggaaccgacagactaacgaacggatcgaagaaatcatccggaccaccgggaaggaaaacgcgaagtacctgatcgaaaagatcaagctccatgacatgcaggaaggaaagtgtctgtactcgctggaggccattccgctggaggacttgctgaacaacccttttaactacgaagtggatcatatcattccgaggagcgtgtcattcgacaattccttcaacaacaaggtcctcgtgaagcaggaggaaaactcgaagaagggaaaccgcacgccgttccagtacctgagcagcagcgactccaagatttcctacgaaaccttcaagaagcacatcctcaacctggcaaaggggaagggtcgcatctccaagaccaagaaggaatatctgctggaagaaagagacatcaacagattctccgtgcaaaaggacttcatcaaccgcaacctcgtggatactagatacgctactcggggtctgatgaacctcctgagaagctactttagagtgaacaatctggacgtgaaggtcaagtcgattaacggaggtttcacctccttcctgcggcgcaagtggaagttcaagaaggaacggaacaagggctacaagcaccacgccgaggacgccctgatcattgccaacgccgacttcatcttcaaagaatggaagaaacttgacaaggctaagaaggtcatggaaaaccagatgttcgaagaaaagcaggccgagtctatgcctgaaatcgagactgaacaggagtacaaggaaatctttattacgccacaccagatcaaacacatcaaggatttcaaggattacaagtactcacatcgcgtggacaaaaagccgaacagggaactgatcaacgacaccctctactccacccggaaggatgacaaagggaataccctcatcgtcaacaaccttaacggcctgtacgacaaggacaacgataagctgaagaagctcattaacaagtcgcccgaaaagttgctgatgtaccaccacgaccctcagacttaccagaagctcaagctgatcatggagcagtatggggacgagaaaaacccgttgtacaagtactacgaagaaactgggaattatctgactaagtactccaagaaagataacggccccgtgattaagaagattaagtactacggcaacaagctgaacgcccatctggacatcaccgatgactaccctaattcccgcaacaaggtcgtcaagctgagcctcaagccctaccggtttgatgtgtaccttgacaatggagtgtacaagttcgtgactgtgaagaaccttgacgtgatcaagaaggagaactactacgaagtcaactccaagtgctacgaggaagcaaagaagttgaagaagatctcgaaccaggccgagttcattgcctccttctataacaacgacctgattaagatcaacggcgaactgtaccgcgtcattggcgtgaacaacgatctcctgaaccgcatcgaagtgaacatgatcgacatcacttaccgggaatacctggagaatatgaacgacaagcgcccgccccggatcattaagactatcgcctcaaagacccagtcgatcaagaagtacagcaccgacatcctgggcaacctgtacgaggtcaaatcgaagaagcacccccagatcatcaagaaggga

SEQ ID NO: 16302 - DNA, 3159 bp, Artificial Sequence
  Synthetic
atgaaaaggaactacattctggggctggccatcgggattacaagcgtggggtatgggattattgactatgaaacaagggacgtgatcgacgcaggcgtcagactgttcaaggaggccaacgtggaaaacaatgagggacggagaagcaagaggggagccaggcgcctgaaacgacggagaaggcacagaatccagagggtgaagaaactgctgttcgattacaacctgctgaccgaccattctgagctgagtggaattaatccttatgaagccagggtgaaaggcctgagtcagaagctgtcagaggaagagttttccgcagctctgctgcacctggctaagcgccgaggagtgcataacgtcaatgaggtggaagaggacaccggcaacgagctgtctacaaaggaacagatctcacgcaatagcaaagctctggaagagaagtatgtcgcagagctgcagctggaacggctgaagaaagatggcgaggtgagagggtcaattaataggttcaagacaagcgactacgtcaaagaagccaagcagctgctgaaagtgcagaaggcttaccaccagctggatcagagcttcatcgatacttatatcgacctgctggagactcggagaacctactatgagggaccaggagaagggagccccttcggatggaaagacatcaaggaatggtacgagatgctgatgggacattgcacctattttccagaagagctgagaagcgtcaagtacgcttataacgcagatctgtacaacgccctgaatgacctgaacaacctggtcatcaccagggatgaaaacgagaaactggaatactatgagaagttccagatcatcgaaaacgtgtttaagcagaagaaaaagcctacactgaaacagattgctaaggagatcctggtcaacgaagaggacatcaagggctaccgggtgacaagcactggaaaaccagagttcaccaatctgaaagtgtatcacgatattaaggacatcacagcacggaaagaaatcattgagaacgccgaactgctggatcagattgctaagatcctgactatctaccagagctccgaggacatccaggaagagctgactaacctgaacagcgagctgacccaggaagagatcgaacagattagtaatctgaaggggtacaccggaacacacaacctgtccctgaaagctatcaatctgattctggatgagctgtggcatacaaacgacaatcagattgcaatctttaaccggctgaagctggtcccaaaaaaggtggacctgagtcagcagaaagagatcccaaccacactggtggacgatttcattctgtcacccgtggtcaagcggagcttcatccagagcatcaaagtgatcaacgccatcatcaagaagtacggcctgcccaatgatatcattatcgagctggctagggagaagaacagcaaggacgcacagaagatgatcaatgagatgcagaaacgaaaccggcagaccaatgaacgcattgaagagattatccgaactaccgggaaagagaacgcaaagtacctgattgaaaaaatcaagctgcacgatatgcaggagggaaagtgtctgtattctctggaggccatccccctggaggacctgctgaacaatccattcaactacgaggtcgatcatattatccccagaagcgtgtccttcgacaattcctttaacaacaaggtgctggtcaagcaggaagagaactctaaaaagggcaataggactcctttccagtacctgtctagttcagattccaagatctcttacgaaacctttaaaaagcacattctgaatctggccaaaggaaagggccgcatcagcaagaccaaaaaggagtacctgctggaagagcgggacatcaacagattctccgtccagaaggattttattaaccggaatctggtggacacaagatacgctactcgcggcctgatgaatctgctgcgatcctatttccgggtgaacaatctggatgtgaaagtcaagtccatcaacggcgggttcacatcttttctgaggcgcaaatggaagtttaaaaaggagcgcaacaaagggtacaagcaccatgccgaagatgctctgattatcgcaaatgccgacttcatctttaaggagtggaaaaagctggacaaagccaagaaagtgatggagaaccagatgttcgaagagaagcaggccgaatctatgcccgaaatcgagacagaacaggagtacaaggagattttcatcactcctcaccagatcaagcatatcaaggatttcaaggactacaagtactctcaccgggtggataaaaagcccaacagagagctgatcaatgacaccctgtatagtacaagaaaagacgataaggggaataccctgattgtgaacaatctgaacggactgtacgacaaagataatgacaagctgaaaaagctgatcaacaaaagtcccgagaagctgctgatgtaccaccatgatcctcagacatatcagaaactgaagctgattatggagcagtacggcgacgagaagaacccactgtataagtactatgaagagactgggaactacctgaccaagtatagcaaaaaggataatggccccgtgatcaagaagatcaagtactatgggaacaagctgaatgcccatctggacatcacagacgattaccctaacagtcgcaacaaggtggtcaagctgtcactgaagccatacagattcgatgtctatctggacaacggcgtgtataaatttgtgactgtcaagaatctggatgtcatcaaaaaggagaactactatgaagtgaatagcaagtgctacgaagaggctaaaaagctgaaaaagattagcaaccaggcagagttcatcgcctccttttacaacaacgacctgattaagatcaatggcgaactgtatagggtcatcggggtgaacaatgatctgctgaaccgcattgaagtgaatatgattgacatcacttaccgagagtatctggaaaacatgaatgataagcgcccccctcgaattatcaaaacaattgcctctaagactcagagtatcaaaaagtactcaaccgacattctgggaaacctgtatgaggtgaagagcaaaaagcaccctcagattatcaaaaagggc

SEQ ID NO: 16303 - DNA, 3159 bp, Artificial Sequence
  Synthetic
atgaaaaggaactacattctggggctggacatcgggattacaagcgtggggtatgggattattgactatgaaacaagggacgtgatcgacgcaggcgtcagactgttcaaggaggccaacgtggaaaacaatgagggacggagaagcaagaggggagccaggcgcctgaaacgacggagaaggcacagaatccagagggtgaagaaactgctgttcgattacaacctgctgaccgaccattctgagctgagtggaattaatccttatgaagccagggtgaaaggcctgagtcagaagctgtcagaggaagagttttccgcagctctgctgcacctggctaagcgccgaggagtgcataacgtcaatgaggtggaagaggacaccggcaacgagctgtctacaaaggaacagatctcacgcaatagcaaagctctggaagagaagtatgtcgcagagctgcagctggaacggctgaagaaagatggcgaggtgagagggtcaattaataggttcaagacaagcgactacgtcaaagaagccaagcagctgctgaaagtgcagaaggcttaccaccagctggatcagagcttcatcgatacttatatcgacctgctggagactcggagaacctactatgagggaccaggagaagggagccccttcggatggaaagacatcaaggaatggtacgagatgctgatgggacattgcacctattttccagaagagctgagaagcgtcaagtacgcttataacgcagatctgtacaacgccctgaatgacctgaacaacctggtcatcaccagggatgaaaacgagaaactggaatactatgagaagttccagatcatcgaaaacgtgtttaagcagaagaaaaagcctacactgaaacagattgctaaggagatcctggtcaacgaagaggacatcaagggctaccgggtgacaagcactggaaaaccagagttcaccaatctgaaagtgtatcacgatattaaggacatcacagcacggaaagaaatcattgagaacgccgaactgctggatcagattgctaagatcctgactatctaccagagctccgaggacatccaggaagagctgactaacctgaacagcgagctgacccaggaagagatcgaacagattagtaatctgaaggggtacaccggaacacacaacctgtccctgaaagctatcaatctgattctggatgagctgtggcatacaaacgacaatcagattgcaatctttaaccggctgaagctggtcccaaaaaaggtggacctgagtcagcagaaagagatcccaaccacactggtggacgatttcattctgtcacccgtggtcaagcggagcttcatccagagcatcaaagtgatcaacgccatcatcaagaagtacggcctgcccaatgatatcattatcgagctggctagggagaagaacagcaaggacgcacagaagatgatcaatgagatgcagaaacgaaaccggcagaccaatgaacgcattgaagagattatccgaactaccgggaaagagaacgcaaagtacctgattgaaaaaatcaagctgcacgatatgcaggagggaaagtgtctgtattctctggaggccatccccctggaggacctgctgaacaatccattcaactacgaggtcgatcatattatccccagaagcgtgtccttcgacaattcctttaacaacaaggtgctggtcaagcaggaagaggcctctaaaaagggcaataggactcctttccagtacctgtctagttcagattccaagatctcttacgaaacctttaaaaagcacattctgaatctggccaaaggaaagggccgcatcagcaagaccaaaaaggagtacctgctggaagagcgggacatcaacagattctccgtccagaaggattttattaaccggaatctggtggacacaagatacgctactcgcggcctgatgaatctgctgcgatcctatttccgggtgaacaatctggatgtgaaagtcaagtccatcaacggcgggttcacatcttttctgaggcgcaaatggaagtttaaaaaggagcgcaacaaagggtacaagcaccatgccgaagatgctctgattatcgcaaatgccgacttcatctttaaggagtggaaaaagctggacaaagccaagaaagtgatggagaaccagatgttcgaagagaagcaggccgaatctatgcccgaaatcgagacagaacaggagtacaaggagattttcatcactcctcaccagatcaagcatatcaaggatttcaaggactacaagtactctcaccgggtggataaaaagcccaacagagagctgatcaatgacaccctgtatagtacaagaaaagacgataaggggaataccctgattgtgaacaatctgaacggactgtacgacaaagataatgacaagctgaaaaagctgatcaacaaaagtcccgagaagctgctgatgtaccaccatgatcctcagacatatcagaaactgaagctgattatggagcagtacggcgacgagaagaacccactgtataagtactatgaagagactgggaactacctgaccaagtatagcaaaaaggataatggccccgtgatcaagaagatcaagtactatgggaacaagctgaatgcccatctggacatcacagacgattaccctaacagtcgcaacaaggtggtcaagctgtcactgaagccatacagattcgatgtctatctggacaacggcgtgtataaatttgtgactgtcaagaatctggatgtcatcaaaaaggagaactactatgaagtgaatagcaagtgctacgaagaggctaaaaagctgaaaaagattagcaaccaggcagagttcatcgcctccttttacaacaacgacctgattaagatcaatggcgaactgtatagggtcatcggggtgaacaatgatctgctgaaccgcattgaagtgaatatgattgacatcacttaccgagagtatctggaaaacatgaatgataagcgcccccctcgaattatcaaaacaattgcctctaagactcagagtatcaaaaagtactcaaccgacattctgggaaacctgtatgaggtgaagagcaaaaagcaccctcagattatcaaaaagggc

SEQ ID NO: 16304 - protein, 3418 aa, Homo sapiens [sequence omitted]

SEQ ID NO: 16305 - protein, 1863 aa, Homo sapiens
MDLSALRVEEVQNVINAMQKILECPICLELIKEPVSTKCDHIFCKFCMLKLLNQKKGPSQCPLCKNDITKRSLQESTRFSQLVEELLKIICAFQLDTGLEYANSYNFAKKENNSPEHLKDEVSIIQSMGYRNRAKRLLQSEPENPSLQETSLSVQLSNLGTVRTLRTKQRIQPQKTSVYIELGSDSSEDTVNKATYCSVGDQELLQITPQGTRDEISLDSAKKAACEFSETDVTNTEHHQPSNNDLNTTEKRAAERHPEKYQGSSVSNLHVEPCGTNTHASSLQHENSSLLLTKDRMNVEKAEFCNKSKQPGLARSQHNRWAGSKETCNDRRTPSTEKKVDLNADPLCERKEWNKQKLPCSENPRDTEDVPWITLNSSIQKVNEWFSRSDELLGSDDSHDGESESNAKVADVLDVLNEVDEYSGSSEKIDLLASDPHEALICKSERVHSKSVESNIEDKIFGKTYRKKASLPNLSHVTENLIIGAFVTEPQIIQERPLTNKLKRKRRPTSGLHPEDFIKKADLAVQKTPEMINQGTNQTEQNGQVMNITNSGHENKTKGDSIQNEKNPNPIESLEKESAFKTKAEPISSSISNMELELNIHNSKAPKKNRLRRKSSTRHIHALELVVSRNLSPPNCTELQIDSCSSSEEIKKKKYNQMPVRHSRNLQLMEGKEPATGAKKSNKPNEQTSKRHDSDTFPELKLTNAPGSFTKCSNTSELKEFVNPSLPREEKEEKLETVKVSNNAEDPKDLMLSGERVLQTERSVESSSISLVPGTDYGTQESISLLEVSTLGKAKTEPNKCVSQCAAFENPKGLIHGCSKDNRNDTEGFKYPLGHEVNHSRETSIEMEESELDAQYLQNTFKVSKRQSFAPFSNPGNAEEECATFSAHSGSLKKQSPKVTFECEQKEENQGKNESNIKPVQTVNITAGFPVVGQKDKPVDNAKCSIKGGSRFCLSSQFRGNETGLITPNKHGLLQNPYRIPPLFPIKSFVKTKCKKNLLEENFEEHSMSPEREMGNENIPSTVSTISRNNIRENVFKEASSSNINEVGSSTNEVGSSINEIGSSDENIQAELGRNRGPKLNAMLRLGVLQPEVYKQSLPGSNCKHPEIKKQEYEEVVQTVNTDFSPYLISDNLEQPMGSSHASQVCSETPDDLLDDGEIKEDTSFAENDIKESSAVFSKSVQKGELSRSPSPFTHTHLAQGYRRGAKKLESSEENLSSEDEELPCFQHLLFGKVNNIPSQSTRHSTVATECLSKNTEENLLSLKNSLNDCSNQVILAKASQEHHLSEETKCSASLFSSQCSELEDLTANTNTQDPFLIGSSKQMRHQSESQGVGLSDKELVSDDEERGTGLEENNQEEQSMDSNLGEAASGCESETSVSEDCSGLSSQSDILTTQQRDTMQHNLIKLQQEMAELEAVLEQHGSQPSNSYPSIISDSSALEDLRNPEQSTSEKAVLTSQKSSEYPISQNPEGLSADKFEVSADSSTSKNKEPGVERSSPSKCPSLDDRWYMHSCSGSLQNRNYPSQEELIKVVDVEEQQLEESGPHDLTETSYLPRQDLEGTPYLESGISLFSDDPESDPSEDRAPESARVGNIPSSTSALKVPQLKVAESAQSPAAAHTTDTAGYNAMEESVSREKPELTASTERVNKRMSMVVSGLTPEEFMLVYKFARKHHITLTNLITEETTHVVMKTDAEFVCERTLKYFLGIAGGKWVVSYFWVTQSIKERKMLNEHDFEVRGDVVNGRNHQGPKRARESQDRKIFRGLEICCYGPFTNMPTDQLEWMVQLCGASVVKELSSFTLGTGVHPIVVVQPDAWTEDNGFHAIGQMCEAPVVTREWVLDSVALYQCQELDTYLIPQIPHSHY

SEQ ID NO: 16306 - protein, 1816 aa, Homo sapiens
MLKLLNQKKGPSQCPLCKNDITKRSLQESTRFSQLVEELLKIICAFQLDTGLEYANSYNFAKKENNSPEHLKDEVSIIQSMGYRNRAKRLLQSEPENPSLQETSLSVQLSNLGTVRTLRTKQRIQPQKTSVYIELGSDSSEDTVNKATYCSVGDQELLQITPQGTRDEISLDSAKKAACEFSETDVTNTEHHQPSNNDLNTTEKRAAERHPEKYQGSSVSNLHVEPCGTNTHASSLQHENSSLLLTKDRMNVEKAEFCNKSKQPGLARSQHNRWAGSKETCNDRRTPSTEKKVDLNADPLCERKEWNKQKLPCSENPRDTEDVPWITLNSSIQKVNEWFSRSDELLGSDDSHDGESESNAKVADVLDVLNEVDEYSGSSEKIDLLASDPHEALICKSERVHSKSVESNIEDKIFGKTYRKKASLPNLSHVTENLIIGAFVTEPQIIQERPLTNKLKRKRRPTSGLHPEDFIKKADLAVQKTPEMINQGTNQTEQNGQVMNITNSGHENKTKGDSIQNEKNPNPIESLEKESAFKTKAEPISSSISNMELELNIHNSKAPKKNRLRRKSSTRHIHALELVVSRNLSPPNCTELQIDSCSSSEEIKKKKYNQMPVRHSRNLQLMEGKEPATGAKKSNKPNEQTSKRHDSDTFPELKLTNAPGSFTKCSNTSELKEFVNPSLPREEKEEKLETVKVSNNAEDPKDLMLSGERVLQTERSVESSSISLVPGTDYGTQESISLLEVSTLGKAKTEPNKCVSQCAAFENPKGLIHGCSKDNRNDTEGFKYPLGHEVNHSRETSIEMEESELDAQYLQNTFKVSKRQSFAPFSNPGNAEEECATFSAHSGSLKKQSPKVTFECEQKEENQGKNESNIKPVQTVNITAGFPVVGQKDKPVDNAKCSIKGGSRFCLSSQFRGNETGLITPNKHGLLQNPYRIPPLFPIKSFVKTKCKKNLLEENFEEHSMSPEREMGNENIPSTVSTISRNNIRENVFKEASSSNINEVGSSTNEVGSSINEIGSSDENIQAELGRNRGPKLNAMLRLGVLQPEVYKQSLPGSNCKHPEIKKQEYEEVVQTVNTDFSPYLISDNLEQPMGSSHASQVCSETPDDLLDDGEIKEDTSFAENDIKESSAVFSKSVQKGELSRSPSPFTHTHLAQGYRRGAKKLESSEENLSSEDEELPCFQHLLFGKVNNIPSQSTRHSTVATECLSKNTEENLLSLKNSLNDCSNQVILAKASQEHHLSEETKCSASLFSSQCSELEDLTANTNTQDPFLIGSSKQMRHQSESQGVGLSDKELVSDDEERGTGLEENNQEEQSMDSNLGEAASGCESETSVSEDCSGLSSQSDILTTQQRDTMQHNLIKLQQEMAELEAVLEQHGSQPSNSYPSIISDSSALEDLRNPEQSTSEKAVLTSQKSSEYPISQNPEGLSADKFEVSADSSTSKNKEPGVERSSPSKCPSLDDRWYMHSCSGSLQNRNYPSQEELIKVVDVEEQQLEESGPHDLTETSYLPRQDLEGTPYLESGISLFSDDPESDPSEDRAPESARVGNIPSSTSALKVPQLKVAESAQSPAAAHTTDTAGYNAMEESVSREKPELTASTERVNKRMSMVVSGLTPEEFMLVYKFARKHHITLTNLITEETTHVVMKTDAEFVCERTLKYFLGIAGGKWVVSYFWVTQSIKERKMLNEHDFEVRGDVVNGRNHQGPKRARESQDRKIFRGLEICCYGPFTNMPTDQLEWMVQLCGASVVKELSSFTLGTGVHPIVVVQPDAWTEDNGFHAIGQMCEAPVVTREWVLDSVALYQCQELDTYLIPQIPHSHY

SEQ ID NO: 16307 - protein, 1884 aa, Homo sapiens
MDLSALRVEEVQNVINAMQKILECPICLELIKEPVSTKCDHIFCKFCMLKLLNQKKGPSQCPLCKNDITKRSLQESTRFSQLVEELLKIICAFQLDTGLEYANSYNFAKKENNSPEHLKDEVSIIQSMGYRNRAKRLLQSEPENPSLQETSLSVQLSNLGTVRTLRTKQRIQPQKTSVYIELGSDSSEDTVNKATYCSVGDQELLQITPQGTRDEISLDSAKKAACEFSETDVTNTEHHQPSNNDLNTTEKRAAERHPEKYQGSSVSNLHVEPCGTNTHASSLQHENSSLLLTKDRMNVEKAEFCNKSKQPGLARSQHNRWAGSKETCNDRRTPSTEKKVDLNADPLCERKEWNKQKLPCSENPRDTEDVPWITLNSSIQKVNEWFSRSDELLGSDDSHDGESESNAKVADVLDVLNEVDEYSGSSEKIDLLASDPHEALICKSERVHSKSVESNIEDKIFGKTYRKKASLPNLSHVTENLIIGAFVTEPQIIQERPLTNKLKRKRRPTSGLHPEDFIKKADLAVQKTPEMINQGTNQTEQNGQVMNITNSGHENKTKGDSIQNEKNPNPIESLEKESAFKTKAEPISSSISNMELELNIHNSKAPKKNRLRRKSSTRHIHALELVVSRNLSPPNCTELQIDSCSSSEEIKKKKYNQMPVRHSRNLQLMEGKEPATGAKKSNKPNEQTSKRHDSDTFPELKLTNAPGSFTKCSNTSELKEFVNPSLPREEKEEKLETVKVSNNAEDPKDLMLSGERVLQTERSVESSSISLVPGTDYGTQESISLLEVSTLGKAKTEPNKCVSQCAAFENPKGLIHGCSKDNRNDTEGFKYPLGHEVNHSRETSIEMEESELDAQYLQNTFKVSKRQSFAPFSNPGNAEEECATFSAHSGSLKKQSPKVTFECEQKEENQGKNESNIKPVQTVNITAGFPVVGQKDKPVDNAKCSIKGGSRFCLSSQFRGNETGLITPNKHGLLQNPYRIPPLFPIKSFVKTKCKKNLLEENFEEHSMSPEREMGNENIPSTVSTISRNNIRENVFKEASSSNINEVGSSTNEVGSSINEIGSSDENIQAELGRNRGPKLNAMLRLGVLQPEVYKQSLPGSNCKHPEIKKQEYEEVVQTVNTDFSPYLISDNLEQPMGSSHASQVCSETPDDLLDDGEIKEDTSFAENDIKESSAVFSKSVQKGELSRSPSPFTHTHLAQGYRRGAKKLESSEENLSSEDEELPCFQHLLFGKVNNIPSQSTRHSTVATECLSKNTEENLLSLKNSLNDCSNQVILAKASQEHHLSEETKCSASLFSSQCSELEDLTANTNTQDPFLIGSSKQMRHQSESQGVGLSDKELVSDDEERGTGLEENNQEEQSMDSNLGEAASGCESETSVSEDCSGLSSQSDILTTQQRDTMQHNLIKLQQEMAELEAVLEQHGSQPSNSYPSIISDSSALEDLRNPEQSTSEKDSHIHGQRNNSMFSKRPREHISVLTSQKSSEYPISQNPEGLSADKFEVSADSSTSKNKEPGVERSSPSKCPSLDDRWYMHSCSGSLQNRNYPSQEELIKVVDVEEQQLEESGPHDLTETSYLPRQDLEGTPYLESGISLFSDDPESDPSEDRAPESARVGNIPSSTSALKVPQLKVAESAQSPAAAHTTDTAGYNAMEESVSREKPELTASTERVNKRMSMVVSGLTPEEFMLVYKFARKHHITLTNLITEETTHVVMKTDAEFVCERTLKYFLGIAGGKWVVSYFWVTQSIKERKMLNEHDFEVRGDVVNGRNHQGPKRARESQDRKIFRGLEICCYGPFTNMPTDQLEWMVQLCGASVVKELSSFTLGTGVHPIVVVQPDAWTEDNGFHAIGQMCEAPVVTREWVLDSVALYQCQELDTYLIPQIPHSHY

SEQ ID NO: 16308 - protein, 759 aa, Homo sapiens
MDLSALRVEEVQNVINAMQKILECPICLELIKEPVSTKCDHIFCKFCMLKLLNQKKGPSQCPLCKNDITKRSLQESTRFSQLVEELLKIICAFQLDTGLEYANSYNFAKKENNSPEHLKDEVSIIQSMGYRNRAKRLLQSEPENPSLQETSLSVQLSNLGTVRTLRTKQRIQPQKTSVYIELGSDSSEDTVNKATYCSVGDQELLQITPQGTRDEISLDSAKKAACEFSETDVTNTEHHQPSNNDLNTTEKRAAERHPEKYQGEAASGCESETSVSEDCSGLSSQSDILTTQQRDTMQHNLIKLQQEMAELEAVLEQHGSQPSNSYPSIISDSSALEDLRNPEQSTSEKVLTSQKSSEYPISQNPEGLSADKFEVSADSSTSKNKEPGVERSSPSKCPSLDDRWYMHSCSGSLQNRNYPSQEELIKVVDVEEQQLEESGPHDLTETSYLPRQDLEGTPYLESGISLFSDDPESDPSEDRAPESARVGNIPSSTSALKVPQLKVAESAQSPAAAHTTDTAGYNAMEESVSREKPELTASTERVNKRMSMVVSGLTPEEFMLVYKFARKHHITLTNLITEETTHVVMKTDAEFVCERTLKYFLGIAGGKWVVSYFWVTQSIKERKMLNEHDFEVRGDVVNGRNHQGPKRARESQDRKIFRGLEICCYGPFTNMPTDQLEWMVQLCGASVVKELSSFTLGTGVHPIVVVQPDAWTEDNGFHAIGQMCEAPVVTREWVLDSVALYQCQELDTYLIPQIPHSHY

SEQ ID NO: 16309 - protein, 699 aa, Homo sapiens
MDLSALRVEEVQNVINAMQKILECPICLELIKEPVSTKCDHIFCKFCMLKLLNQKKGPSQCPLCKNDITKRSLQESTRFSQLVEELLKIICAFQLDTGLEYANSYNFAKKENNSPEHLKDEVSIIQSMGYRNRAKRLLQSEPENPSLQETSLSVQLSNLGTVRTLRTKQRIQPQKTSVYIELGSDSSEDTVNKATYCSVGDQELLQITPQGTRDEISLDSAKKAACEFSETDVTNTEHHQPSNNDLNTTEKRAAERHPEKYQGEAASGCESETSVSEDCSGLSSQSDILTTQQRDTMQHNLIKLQQEMAELEAVLEQHGSQPSNSYPSIISDSSALEDLRNPEQSTSEKVLTSQKSSEYPISQNPEGLSADKFEVSADSSTSKNKEPGVERSSPSKCPSLDDRWYMHSCSGSLQNRNYPSQEELIKVVDVEEQQLEESGPHDLTETSYLPRQDLEGTPYLESGISLFSDDPESDPSEDRAPESARVGNIPSSTSALKVPQLKVAESAQSPAAAHTTDTAGYNAMEESVSREKPELTASTERVNKRMSMVVSGLTPEEFMLVYKFARKHHITLTNLITEETTHVVMKTDAEFVCERTLKYFLGIAGGKWVVSYFWVTQSIKERKMLNEHDFEVRGDVVNGRNHQGPKRARESQDRKIFRGLEICCYGPFTNMPTGCPPNCGCAARCLDRGQWLPCNWADV

SEQ ID NO: 16310 - protein, 339 aa, Homo sapiens
MAMQMQLEANADTSVEEESFGPQPISRLEQCGINANDVKKLEEAGFHTVEAVAYAPKKELINIKGISEAKADKILAEAAKLVPMGFTTATEFHQRRSEIIQITTGSKELDKLLQGGIETGSITEMFGEFRTGKTQICHTLAVTCQLPIDRGGGEGKAMYIDTEGTFRPERLLAVAERYGLSGSDVLDNVAYARAFNTDHQTQLLYQASAMMVESRYALLIVDSATALYRTDYSGRGELSARQMHLARFLRMLLRLADEFGVAVVITNQVVAQVDGAAMFAADPKKPIGGNIIAHASTTRLYLRKGRGETRICKIYDSPCLPEAEAMFAINADGVGDAKD

SEQ ID NO: 16311 - protein, 340 aa, Homo sapiens
MAMQMQLEANADTSVEEESFGPQPISRLEQCGINANDVKKLEEAGFHTVEAVAYAPKKELINIKGISEAKADKILTESRSVARLECNSVILVYCTLRLSGSSDSPASASRVVGTTGGIETGSITEMFGEFRTGKTQICHTLAVTCQLPIDRGGGEGKAMYIDTEGTFRPERLLAVAERYGLSGSDVLDNVAYARAFNTDHQTQLLYQASAMMVESRYALLIVDSATALYRTDYSGRGELSARQMHLARFLRMLLRLADEFGVAVVITNQVVAQVDGAAMFAADPKKPIGGNIIAHASTTRLYLRKGRGETRICKIYDSPCLPEAEAMFAINADGVGDAKD

SEQ ID NO: 16312 - protein, 280 aa, Homo sapiens
MAMQMQLEANADTSVEEESFGPQPISRLEQCGINANDVKKLEEAGFHTVEAVAYAPKKELINIKGISEAKADKILAEAAKLVPMGFTTATEFHQRRSEIIQITTGSKELDKLLQGGIETGSITEMFGEFRTGKTQICHTLAVTCQLPIDRGGGEGKAMYIDTEGTFRPERLLAVAERYGLSGSDVLDNVAYARAFNTDHQTQLLYQASAMMVESRYALLIVDSATALYRTDYSGRGELSARQMHLARFLRMLLRLADEIVSEERKRGNQNLQNLRLSLSS

SEQ ID NO: 16313 - DNA, 20 bp, Artificial Sequence
  Synthetic
aggccatcactaaaggcacc

SEQ ID NO: 16314 - DNA, 20 bp, Artificial Sequence
  Synthetic
taagccagtgccagaagagc

SEQ ID NO: 16315 - DNA, 42 bp, Artificial Sequence
  Synthetic
ccatctcatccctgcgtgtctccgaccaccagcagcctaagg

SEQ ID NO: 16316 - DNA, 47 bp, Artificial Sequence
  Synthetic
cctctctatgggcagtcggtgatggccatctattgcttacatttgct

SEQ ID NO: 16317 - DNA, 47 bp, Artificial Sequence
  Synthetic
tcatccacgttcaccttgccccacagggcagtaacggcagacttctc

SEQ ID NO: 16318 - RNA, 20 nt, Artificial Sequence
  Synthetic
guaacggcagacuucuccac

SEQ ID NO: 16319 - RNA, 20 nt, Artificial Sequence
  Synthetic
ccuguggggcaaggugaacg

SEQ ID NO: 16320 - RNA, 20 nt, Artificial Sequence
  Synthetic
ugaaguugguggugaggccc

SEQ ID NO: 16321 - DNA, 68 bp, Artificial Sequence
  Synthetic
ccaccaacttcatccacgttcaccttgccccacagggcagtaacggcagacttctcctcaggagtcag

SEQ ID NO: 16322 - DNA, 68 bp, Artificial Sequence
  Synthetic
ccaccaactgcatccacgttcactttgccccacagggcattgacagcagtcttctcctcaggagtcag

SEQ ID NO: 16323 - DNA, 67 bp, Artificial Sequence
  Synthetic
caccaccaacttcatccacgttcaccttgccccacagggcagtaacggcagacttctcctcaggagt

SEQ ID NO: 16324 - DNA, 67 bp, Artificial Sequence
  Synthetic
caccacgaacttcatccacgttaagcttgccctgcagggcagtaacggccgacttctccacacgagt

SEQ ID NO: 16325 - DNA, 38 bp, Artificial Sequence
  Synthetic
tccacgttcaccttgccccacagggcagtaacggcaga

SEQ ID NO: 16326 - DNA, 64 bp, Artificial Sequence
  Synthetic
ccaacttcatccacgttcaccttgccccacagggcagtaacggcagacttctcctcaggagtca

SEQ ID NO: 16327 - DNA, 125 bp, Artificial Sequence
  Synthetic
cccggtcaccaccaacttcatccacgttcaccttcccccacacccgagtaacggcagacttctctcatccacgttcaccttgccccacagggcagtaacggcagacttctcctcaggagtcaggt

SEQ ID NO: 16328 - DNA, 125 bp, Artificial Sequence
  Synthetic
acctgactcctgaggagaagtctgccgttactgccctgtggggcaaggtgaacgtggatgagacaagtctgccgttactgccctgtggggcaaggtgaacgtggatgaagttggtggtgaggccc

SEQ ID NO: 16329 - DNA, 168 bp, Artificial Sequence
  Synthetic
gggcctcaccaccaacttcatccacgttcaccttgccccacagggcagtaacggcagacttctcatccacgttcaccttgccccacagggcagtaacggcagacttctcatccacgttcaccttgccccacagggcagtaacggcagacttctcctcaggagtcaggt

SEQ ID NO: 16330 - DNA, 168 bp, Artificial Sequence
  Synthetic
acctgactcctgaggagaagtctgccgttactgccctgtggggcaaggtgaacgtggatgagaagtctgccgttactgccctgtggggcaaggtgaacgtggatgagaagtctgccgttactgccctgtggggcaaggtgaacgtggatgaagttggtggtgaggccc
